(19) United States
(12) Patent Application Publication
(10) Pub. No.: US 2008/0003202 A1
(43) Pub. Date: Jan. 3, 2008

(54) Modified interferon-beta (IFN-beta) polypeptides

(76) Inventors: Thierry Guyon, Palaiseau (FR); Gilles Borrelly, Combs La Ville (FR); Lila Drittanti, Vigneux-sur-Seine (FR); Manuel Vega, Vigneux-sur-Seine (FR)

Correspondence Address: FISH & RICHARDSON, PC, P.O. BOX 1022, MINNEAPOLIS, MN, 55440-1022, US

(21) Appl. No.: 11/729,266

(22) Filed: Mar. 27, 2007

Related U.S. Application Data
(60) Provisional application No. 60/787,208, filed on Mar. 28, 2006.

(51) Int. Cl. A61K 38/21; C07K 14/00; C12N 1/20; C12N 15/00; C12N 15/11; C12N 5/04; C12N 5/06; C12P 21/04

(52) U.S. Cl. 424/85.6; 435/252.3; 435/320.1; 435/325; 435/410; 435/69.51; 530/351; 536/23.52

(57) ABSTRACT

Provided are modified interferon-beta polypeptides and nucleic acid molecules encoding modified interferon-beta polypeptides and formulations containing the polypeptides and/or nucleic acid molecules. The modified polypeptides exhibit increased protein stability, including increased resistance to proteases. Also provided are methods of treatment by administering modified interferon-beta polypeptides.

### RELATED APPLICATIONS

### Priority

[0001] Benefit of priority is claimed under 35 U.S.C. §119(e) to U.S. Provisional Application Ser. No. 60/787,208, to Thierry Guyon, Gilles Borrelly, Lila Drittanti and Manuel Vega, entitled “MODIFIED INTERFERON-β (IFN-β) POLYPEPTIDES,” filed Mar. 28, 2006. The subject matter of this application is incorporated by reference in its entirety.

### Related Applications/Patents

[0002] This application is related to U.S. application Ser. No. 11/729,267, to Thierry Guyon, Gilles Borrelly, Lila Drittanti and Manuel Vega, entitled “MODIFIED INTERFERON-β (IFN-β) POLYPEPTIDES,” filed the same day herewith, and to International PCT Application Serial No. PCT/EP2007/002700, to Thierry Guyon, Gilles Borrelly, Lila Drittanti and Manuel Vega, entitled “MODIFIED INTERFERON-β (IFN-β) POLYPEPTIDES,” filed Mar. 27, 2007 both of which also claim priority to U.S. Provisional Application Ser. No. 60/787,208, to Thierry Guyon, Gilles Borrelly, Lila Drittanti and Manuel Vega, entitled “MODIFIED INTERFERON-β (IFN-β) POLYPEPTIDES,” filed Mar. 28, 2006.

[0003] This application also is related to U.S. application Ser. No. 11/176,830, to Rene Gantier, Thierry Guyon, Manuel Vega and Lila Drittanti, entitled “RATIONAL EVOLUTION OF CYTOKINES FOR HIGHER STABILITY, THE CYTOKINES AND ENCODING NUCLEIC ACID MOLECULES,” filed Jul. 6, 2005 and published as U.S. Application No. US 2006-0020116, which is a continuation of U.S. application Ser. No. 10/658,834, to Rene Gantier, Thierry Guyon, Manuel Vega and Lila Drittanti entitled “RATIONAL EVOLUTION OF CYTOKINES FOR HIGHER STABILITY, THE CYTOKINES AND ENCODING NUCLEIC ACID MOLECULES,” filed Sep. 8, 2003 and published as U.S. Application No. US-2004-0132977-A1. This application also is related to U.S. application Ser. No. 11/706,088, to Rene Gantier, Thierry Guyon, Manuel Vega and Lila Drittanti, entitled “RATIONAL EVOLUTION OF CYTOKINES FOR HIGHER STABILITY, THE CYTOKINES AND ENCODING NUCLEIC ACID MOLECULES,” filed Feb. 13, 2007, which is a divisional application of U.S. application Ser. No. 10/658,834, to Rene Gantier, Thierry Guyon, Manuel Vega and Lila Drittanti entitled “RATIONAL EVOLUTION OF CYTOKINES FOR HIGHER STABILITY, THE CYTOKINES AND ENCODING NUCLEIC ACID MOLECULES.”

[0004] This application also is related to U.S. application Ser. No. 11/196,067, to Rene Gantier, Thierry Guyon, Hugo Cruz Ramos, Manuel Vega and Lila Drittanti entitled “RATIONAL DIRECTED PROTEIN EVOLUTION USING TWO-DIMENSIONAL RATIONAL MUTAGENESIS SCANNING,” filed Aug. 2, 2005 and published as U.S. Application No. US-2006-0020396-A1, which is a continuation of U.S. application Ser. No. 10/658,355, to Rene Gantier, Thierry Guyon, Hugo Cruz Ramos, Manuel Vega and Lila Drittanti entitled “RATIONAL DIRECTED PROTEIN EVOLUTION USING TWO-DIMENSIONAL RATIONAL MUTAGENESIS SCANNING,” filed Sep. 8, 2003 and published as U.S. Application No. US 2005-0202438.

[0005] This application also is related to U.S. application Ser. No. 10/658,834, filed Sep. 8, 2003, and to published International PCT Application WO 2004/022593, to Rene Gantier, Thierry Guyon, Manuel Vega and Lila Drittanti entitled, “RATIONAL EVOLUTION OF CYTOKINES FOR HIGHER STABILITY, THE CYTOKINES AND ENCODING NUCLEIC ACID MOLECULES.” This application also is related to U.S. application Ser. No. 10/658,355, filed Sep. 8, 2003, and to International PCT Application WO 2004/022747, to Rene Gantier, Thierry Guyon, Hugo Cruz Ramos, Manuel Vega and Lila Drittanti entitled “RATIONAL DIRECTED PROTEIN EVOLUTION USING TWO-DIMENSIONAL RATIONAL MUTAGENESIS SCANNING.”

[0006] The subject matter of each of the above-noted applications, provisional applications and international applications is incorporated by reference in its entirety.

### INCORPORATION BY REFERENCE OF SEQUENCE LISTING PROVIDED ON COMPACT DISCS

[0007] An electronic version on compact disc (CD-R) of the Sequence Listing is filed herewith in duplicate (labeled Copy # 1 and Copy # 2), the contents of which are incorporated by reference in their entirety. The computer-readable file on each of the aforementioned compact discs, created on Mar. 26, 2007 is identical, 935 kilobytes in size, and titled 924BSEQ.001.txt.

### FIELD OF THE INVENTION

[0008] Modified Interferon-β (IFN-β) polypeptides that have pre-selected modified properties compared to unmodified or wild-type proteins, and nucleic acid molecules encoding these proteins are provided. The polypeptides can be used for treatment and diagnosis.

### BACKGROUND

[0009] Effective delivery of therapeutic proteins for clinical use is a major challenge to pharmaceutical science. Once in the blood stream, these proteins are constantly eliminated from circulation within a short time by different physiological processes, involving metabolism as well as clearance using normal pathways for protein elimination, such as (glomerular) filtration in the kidneys or proteolysis in blood. Once in the luminal gastrointestinal tract, these proteins are constantly digested by luminal proteases. The latter is often the limiting process affecting the half-life of proteins used as therapeutic agents in per-oral administration and either intravenous or intramuscular injection. The problems associated with these routes of administration of proteins are well known and various strategies have been used in attempts to solve them.

[0010] A protein family that has been the focus of clinical work and effort to improve its administration and bio-assimilation is the cytokine family, including the interferon family. Interferon molecules are grouped in the heterogeneous family of cytokines, originally identified on the basis of their ability to induce cellular resistance to viral infections (Diaz et al., J. Interferon Cytokine Res., 16: 179-180 (1996)). Type I interferons, referred to as interferons α/β, include many members of the interferon α family (interferon α1, α2, ω and τ) as well as interferon β. The type II interferon-γ is different from type I in its particular mechanisms that regulate its production. Whereas the production of interferons α/β is most efficiently induced in many types of cells upon viral infection, interferon-γ is produced mainly in cells of hematopoietic system, such as T-cells or natural killer cells, upon stimulation by antigens or cytokines, respectively. These two interferon systems are functionally non-redundant in the anti-viral defense host.

[0011] Interferons, as well as many other cytokines, are important therapeutics. Naturally occurring variants can have undesirable side effects as well as the problems of administration, bioavailability and short half-life. IFN-β has been well established as a pharmaceutical for humans and other animals. Because of its instability in the blood stream and under storage conditions, therapeutic protocols require frequent and repeated administration. Hence, there is a need to improve properties of IFN-β for its use as a biotherapeutic. Therefore, among the objects herein, it is an object to provide modified IFN-β polypeptides that have improved therapeutic properties and/or activities.

### SUMMARY

[0012] Provided herein are modified IFN-β polypeptides that have improved properties, particularly therapeutic properties and/or activities. Modified IFN-β polypeptides provided herein exhibit increased protein stability compared to an unmodified IFN-β polypeptide or an IFN-β that does not have such modifications or corresponding modifications. Modified IFN-β polypeptides provided herein that exhibit increased protein stability display, among other parameters, increased protein half-life in vivo or in vitro compared to an unmodified IFN-β polypeptide. Increased protein stability of a modified IFN-β provided herein can be manifested in a variety of ways, such as increased resistance to digestion by proteases and/or increased conformational stability.

[0013] Therapeutic use of IFN-β is well established for human and other animals. Because of its instability in the bloodstream, as well as under storage conditions, therapy with IFN-β can require frequent and repeated applications. The modified IFN-β polypeptides provided herein are mutant variants of IFN-β that display improved protein stability. These variants possess increased protein half-life, including, for example, increased stability in the bloodstream, following oral administration, and/or under storage conditions. Such increased stability includes stability as assessed by resistance to blood, intestinal or any other proteases and/or increased thermal tolerance and/or tolerance to pH and/or other potentially denaturing and stability disrupting conditions.

[0014] Modified IFN-β polypeptides provided herein that exhibit increased protein stability include IFN-β polypeptides modified at any number of residues whereby the targeted activity or property that is modified, such as protease resistance, is modified, and such that at least one activity, typically a therapeutic activity, is retained at a level, so as, for example, to permit formulation of the IFN-β polypeptide at an effective dosage for treatment. In general, the modified IFN-β polypeptides include 1 or 2 modifications, but can include such modifications in addition to modifications that alter other properties. Hence, included are modified IFN-β in which a total of 1, 2, 3, 4, 5, 6, 7, 8, 9, 10, 11, 12, 13, 14, 15, 16, 17, 18, 19, or 20 positions are modified compared to an unmodified IFN-β polypeptide. Modified IFN-β polypeptides include mature forms (i.e. the polypeptide whose sequence is set forth in SEQ ID NO. 1) and precursor forms (i.e. the polypeptide whose sequence is set forth in SEQ ID NO. 2). Modification is with reference to a wildtype human IFN-β polypeptide that includes a sequence of amino acids set forth in SEQ ID NO:1 or SEQ ID NO:2, respectively, and also includes modification relative to allelic or species variant or an isoform of an IFN-β polypeptide set forth in SEQ ID NO:1 or SEQ ID NO:3. Allelic and species variants can have 40%, 50%, 60%, 70%, 80%, 90%, 91%, 92%, 93%, 94%, 95%, 96%, 97%, 98%, or 99% sequence identity to the polypeptide set forth in SEQ ID NO:1, excluding any amino acid modification thereof. Modified loci are identified with reference to the amino acid numbering of a unmodified mature IFN-β polypeptide whose sequence of amino acids is set forth in SEQ ID NO:1. Corresponding positions on a particular polypeptide readily can be determined, such as by alignment of unchanged residues. The modified IFN-β polypeptide exhibits increased protein stability compared to the unmodified IFN-β polypeptide. Typically, the modified IFN-β polypeptide also retains one or more activities and/or properties of the unmodified IFN-β polypeptide.

[0015] Provided herein are modified IFN-β polypeptides containing an amino acid modification at a position corresponding to amino acid residues L5 or L6 of a mature IFN-β polypeptide set forth in SEQ ID NO:1, that also contains a further amino acid modification at another position. For example, such a modified IFN-β polypeptide has 2, 3, 4, 5, 6, 7, 8, 9, 10, 11, 12, 13, 14, 15, 16, 17, 18, 19, or 20 modifications. Modified IFN-β polypeptides with modifications at positions L5 or L6 include mature forms (i.e. the polypeptide whose sequence is set forth in SEQ ID NO. 1) and precursor forms (i.e. the polypeptide whose sequence is set forth in SEQ ID NO. 2). The amino acid modification at position L5 or L6 is a replacement of leucine (L) by any of aspartic acid (D), glutamine (Q), asparagines (N), or glutamic acid (E). In one example, the further amino acid replacement is at positions corresponding to any of amino acid positions M1, Y3, L5, L6, F8, L9, Q10, R11, S12, S13, N14, F15, Q16, C17, Q18, K19, L20, L21, W22, Q23, L24, N25, R27, L28, E29, Y30, C31, L32, K33, D34, R35, M36, F38, D39, P41, E42, E43, K45, L47, Q48, Q49, F50, Q51, K52, E53, D54, L57, Y60, E61, M62, L63, Q64, F67, F70, R71, Q72, D73, G78, W79, N80, E81, T82, I83, E85, N86, L87, L88, A89, N90, V91, Y92, Q94, I95, H97, L98, K99, V101, L102, E103, E104, K105, L106, E107, K108, E109, D110, R113, K115, L116, M117, L120, L122, K123, R124, Y125, Y126, R128, L130, Y132, L133, K134, K136, E137, Y138, W143, R147, E149, L151, R152, F154, Y155, F156, R159, L160, Y163, L164, and R165 of a mature IFN-β polypeptide set forth in SEQ ID NO:1. For example, such further replacements include M1V (i.e., replacement of M by V at a position corresponding to amino acid position 1 of mature IFN-β (e.g., SEQ ID NO:1), M1I, M1T, M1A, M1Q, M1D, M1E, M1K, M1N, M1R, M1S, M1C, Y3I, Y3H, L5V, L5I, L5T, L5Q, L5H, L5A, L5D, L5E, L5K, L5R, L5N, L5S, L6D, L6E, L6K, L6N, L6Q, L6R, L6S, L6T, L6C, L6I, L6V, L6H, L6A, F8I, F8V, F8D, F8E, F8K, F8R, L9V, L9I, L9T, L9Q, L9H, L9A, L9D, L9E, L9K, L9N, L9R, L9S, Q10D, Q10E, Q10K, Q10N, Q10R, Q10S, Q10T, Q10C, R11H, R11Q, R11D, S12D, S12E, S12K, S12R, S13D, S13E, S13K, S13N, S13Q, S13R, S13T, S13C, N14D, N14E, N14K, N14Q, N14R, N14S, N14T, F15I, F15V, F15D, F15E, F15K, F15R, Q16D, Q16E, Q16K, Q16N, Q16R, Q16S, Q16T, Q16C, C17D, C17E, C17K, C17N, C17R, C17S, C17T, Q18H, Q18S, Q18T, Q18N, K19N, K19Q, K19T, K19S, K19H, L20I, L20V, L20H, L20A, L20N, L20Q, L20R, L20S, L20T, L20D, L20E, L20K, L21I, L21V, L21T, L21Q, L21H, L21A, W22S, W22H, W22D, W22E, W22K, W22R, Q23D, Q23E, Q23K, Q23R, Q23H, Q23S, Q23T, Q23N, L24I, L24V, L24T, L24Q, L24H, L24A, L24D, L24E, L24K, L24R, N25H, N25S, N25Q, R27H, R27Q, L28V, L28I, L28T, L28Q, L28H, L28A, E29Q, E29H, E29N, Y30H, Y30I, L32V, L32I, L32T, L32Q, L32H, L32A, K33Q, K33T, K33S, K33H, K33N, D34N, D34Q, D34G, R35H, R35Q, M36V, M36I, M36T, M36Q, M36A, F38I, F38V, D39N, D39Q, D39H, D39G, P41A, P41S, E42N, E42Q, E42H, E43K, E43Q, E43H, E43N, K45D, K45N, K45Q, K45T, K45S, K45H, L47V, L47I, L47T, L47Q, L47H, L47A, Q48H, Q48S, Q48T, Q48N, Q49H, Q49S, Q49T, Q49N, F50I, F50V, Q51H, Q51S, Q51T, Q51N, K52Q, K52T, K52S, K52H, K52D, K52N, E53R, E53Q, E53H, E53N, D54K, D54Q, D54N, D54G, L57I, L57V, L57T, L57Q, L57H, L57A, Y60H, Y60I, E61K, E61Q, E61H, E61N, M62I, M62V, M62T, M62Q, M62A, L63I, L63V, L63T, L63Q, L63H, L63A, Q64H, Q64S, Q64T, Q64N, F67I, F67V, F70I, F70V, R71H, R71Q, Q72H, Q72S, Q72T, Q72N, D73Q, D73H, D73G, D73N, G78D, G78E, G78K, G78R, W79H, W79S, N80D, N80E, N80K, N80R, E81Q, E81H, E81K, E81N, T82D, T82E, T82K, T82R, I83D, I83E, I83K, I83R, I83N, I83Q, I83S, I83T, E85Q, E85H, E85K, E85N, N86D, N86E, N86K, N86R, N86Q, N86S, N86T, L87D, L87E, L87K, L87R, L87N, L87Q, L87S, L87T, L87I, L87V, L87H, L87A, L88I, L88V, L88T, L88Q, L88H, L88A, A89D, A89E, A89K, A89R, N90D, N90E, N90K, N90Q, N90R, N90S, N90T, N90C, V91D, V91E, V91K, V91N, V91Q, V91R, V91S, V91T, V91C, Y92H, Y92I, Q94D, Q94E, Q94K, Q94N, Q94R, Q94S, Q94T, Q94C, I95D, I95E, I95K, I95N, I95Q, I95R, I95S, I95T, H97D, H97E, H97K, H97N, H97Q, H97R, H97S, H97T, H97C, L98D, L98E, L98K, L98N, L98Q, L98R, L98S, L98T, L98C, L98I, L98V, L98H, L98A, K99N, K99Q, K99T, K99S, K99H, V101D, V101E, V101K, V101N, V101Q, V101R, V101S, V101T, V101C, L102I, L102V, L102T, L102Q, L102H, L102A, E103K, E103N, E103Q, E103H, E104Q, E104H, E104R, E104N, K105Q, K105T, K105S, K105H, K105D, K105N, L106I, L106V, L106T, L106Q, L106H, L106A, E107Q, E107H, E107R, E107N, K108D, K108N, K108Q, K108T, K108S, K108H, E109H, E109Q, E109R, E109N, D110K, D110N, D110Q, D110H, D110G, F111I, F111V, R113H, R113Q, R113E, K115D, K115Q, K115N, K115S, K115H, L116V, L 116I, L116T, L116Q, L116H, L116A, M117I, M117V, M117T, M117Q, M117A, L120V, L120I, L120T, L120Q, L120H, L120A, L122I, L122V, L122T, L122Q, L122H, L122A, K123Q, K123T, K123S, K123H, K123N, R124D, R124E, R124H, R124Q, Y125H, Y125I, Y126H, Y126I, R128H, R128Q, L130V, L130I, L130T, L130Q, L130H, L130A, Y132H, Y132I, L133I, L133V, L133T, L133Q, L133H, L133A, K134Q, K134T, K134S, K134H, K134N, K136N, K136Q, K136T, K136S, K136H, E137Q, E137H, E137N, Y138H, Y138I, W143H, W143S, R147H, R147Q, E149Q, E149H, E149N, L151I, L151V, L151T, L151Q, L151H, L151A, R152D, R152H, R152Q, F154I, F154V, Y155H, Y155I, F156I, F156V, R159H, R159Q, L160I, L160V, L160T, L160Q, L160H, L160A, Y163H, Y163I, L164I, L164V, L164T, L164Q, L164H, L164A, R165D, R165H, and R165Q.

[0016] In one example, exemplary amino acid modifications of an IFN-β polypeptide include amino acid modifications of any of L5D/L6E (i.e., replacement of L by D at a position corresponding to amino acid position 5 and replacement of L by E at a position corresponding to amino acid position 6, of mature IFN-β (e.g., SEQ ID NO:1), L5E/Q0D, L5Q/M36I, L6E/L47I, L5E/K108S, L5E/L6E, L5D/Q10D, L5N/M36I, L6Q/L47I, L5D/K108S, L5N/L6E, L5Q/Q10D, L6E/M36I, L5E/N86Q, L5Q/K108S, L5Q/L6E, L5N/Q10D, L6Q/M36I, L5D/N86Q, L5N/K108S, L5D/L6Q, L6E/Q10D, L5E/L47I, L5Q/N86Q, L6E/L6Q, L6Q/Q10D, L5D/L47I, L6Q/K108S, L5N/L6Q, L6E/M36I, L5Q/L47I, L6E/N86Q, L5Q/L6Q, L5D/M36I, L5N/L47I, L6Q/N86Q, L6E/K108S, and L5N/N86Q. For example, a modified IFN-β polypeptide provided herein has a sequence of amino acids set forth in any of SEQ ID NOS:88-125, or a biologically active portion thereof.

[0017] In some examples, a modified IFN-β polypeptide containing a modification corresponding to position L5 or L6 of a mature IFN-β polypeptide set forth in SEQ ID NO:1, and that also contains a further amino acid modification, exhibits increased protein stability and retains one of more activities of the unmodified IFN-β polypeptide. Generally, increased protein stability is increased protein half-life in vitro or in vivo. Increased protein stability of the modified IFN-β polypeptide is the result only of modification to the primary sequence of the IFN-β polypeptide. In some cases, a modified IFN-β polypeptide provided herein also can include a further amino acid modification that contributes to deimmunization, glycosylation, or PEGylation of the polypeptide such that a modified polypeptide provided herein can be glycosylated or conjugated to a polyethylene glycol (PEG) moiety.

[0018] The increased protein stability exhibited by an IFN-β polypeptide can be manifested as increased protease resistance or increased conformational stability. For example, such an exemplary IFN-β polypeptide can include modifications corresponding to L5D/L47I (SEQ ID NO:115), L5D/L6Q (SEQ ID NO:108), or L6Q/K108S (SEQ ID NO:117).

[0019] Increased protein stability of an IFN-β polypeptide can result from, for example, increased resistance to proteolysis by proteases or a protease that occur/occurs in serum, blood, saliva, digestive fluids, and/or in vitro. For example, the proteases include, any of pepsin, trypsin, chymotrypsin, elastase, aminopeptidase, gelatinase B, gelatinase A, α-chymotrypsin, carboxypeptidase, endoproteinase Arg-C, endoproteinase Asp-N, endoproteinase Glu-C, endoproteinase Lys-C, luminal pepsin, microvillar endopeptidase, dipeptidyl peptidase, enteropeptidase, hydrolase, NS3, factor Xa, Granzyme B, thrombin, plasmin, urokinase, tPA and PSA. In some examples, a modified IFN-β polypeptide that contains an amino acid modification corresponding to amino acid positions L5 or L6 of mature IFN-β set forth in SEQ ID NO:1, and that contains a further amino acid modification, exhibits increased protein stability due to increased protease resistance to gelatinase B. Exemplary of those modified IFN-β polypeptides are those with modifications corresponding to L6E/K108S, L5Q/K108S, L5E/K108S, L5N/Q10D, and L5N/K108S of a mature IFN-β polypeptide.

[0020] Provided herein are modified IFN-β polypeptides containing one or more amino acid modification corresponding to any of Y3I (i.e., replacement of Y by I at a position corresponding to amino acid position 3 of mature IFN-β (e.g., SEQ ID NO:1), Y3H, L6I, L6V, L6H, L6A, R11D, Q18S, Q18N, Q18H, Q18T, K19N, L20I, L20V, L20H, L20A, L21I, L21V, L21T, L21Q, L21H, L21A, Q23H, Q23S, Q23T, Q23N, L24I, L24V, L24T, L24Q, L24H, L24A, E29N, K33N, D34N, D34Q, D34G, F38I, F38V, D39N, P41A, P41S, E42N, E43N, E43K, E43Q, E43H, K45D, K45N, Q48S, Q48T, Q48N, Q49H, Q49S, Q49T, Q49N, F50I, F50V, Q51H, Q51S, Q51T, Q51N, K52D, K52N, E53N, E53R, E53Q, E53H, D54K, D54N, D54G, D54Q, L57I, L57T, L57Q, L57H, Y60I, Y60H, E61K, E61H, E61N, E61Q, M62I, M62V, M62T, M62Q, L63I, L63V, L63T, L63Q, L63H, L63A, Q64H, Q64S, Q64T, Q64N, F70I, F70V, Q72H, Q72S, Q72T, Q72N, D73N, W79H, W79S, E81K, E81N, E85N, E85K, L87I, L87V, L87H, L87A, L88I, L88V, L88T, L88Q, L88H, L88A, L98I, L98V, L98H, L98A, K99N, L102I, L102V, L102T, L102Q, L102H, L102A, E103N, E103K, E104N, E104R, K105D, K105N, L106I, L106V, L106T, L106Q, L106H, L106A, E107N, E107R, K108D, K108N, E109R, E109N, D110K, D110N, R113E, K115D, K115N, K115S, K115H, K115Q, M117I, M117V, M117T, M117Q, M117A, L122I, L122V, L122T, L122Q, L122H, L122A, K123N, R124D, R124E, Y125I, Y125H, Y126I, Y126H, Y132I, Y132H, L133I, L133V, L133T, L133Q, L133H, L133A, K134N, K136N, E137N, W143H, W143S, R147H, R147Q, E149H, E149N, E149Q, L151I, L151V, L151T, L151Q, L151H, L151A, R152D, F154V, F154I, F156I, L160I, L160V, L160T, L160Q, L160H, L160A, L164I, L164V, L164T, L164Q, L164H, L164A, and R165D. SEQ ID NOS: of exemplary modified IFN-β polypeptides are set forth in any of SEQ ID NOS: 4-68, 71-82, 84-87, 134-153, 519, 520, 534-557, 559, 560, 562-564, 566-606, and 608-650, or a biologically active portion thereof.

[0021] Such a modification of an IFN-β polypeptide at one or more positions set forth above can be in a mature human IFN-β polypeptide of SEQ ID NO:1, or its precursor form set forth in SEQ ID NO:2. Modification also be can in a recombinant IFN-β polypeptide set forth in SEQ ID NO:3. It also is understood that amino acid modification of an IFN-β polypeptide can be in an allelic, species, or isoform variant of SEQ ID NO:1, where the allelic or species variant has 40%, 50%, 60%, 70%, 80%, 90%, 91%, 92%, 93%, 94%, 95%, 96%, 97%, 98%, or 99% sequence identity to the polypeptide set forth in SEQ ID NO:1, excluding the modified positions.

[0022] Exemplary amino acid modifications correspond to any of Y3I, Q18S, Q18N, K19N, L20I, L20V, K33N, D34N, P41A, P41S, E42N, E43N, K45D, K45N, Q48S, Q48T, Q49H, Q49S, Q49T, F50I, F50V, Q51H, Q51S, Q51T, Q51N, K52D, K52N, E53N, D54K, D54N, D54G, L57I, Y60I, E61K, E61H, E61N, L63I, Q64H, Q64S, Q64T, F70I, F70V, Q72H, Q72S, E85N, L88I, L88V, L98I, L98V, K99N, E103N, E104N, K105D, K105N, L106I, L106V, E107N, E109N, K115D, K115N, K115S, K115H, K123N, Y125I, Y126I, Y132I, K134N, K136N, R147H, R147Q, E149H, E149N, L151I, and F154V of the mature IFN-β polypeptide set forth in SEQ ID NO:1. In some instances where the unmodified IFN-β is the polypeptide set forth in SEQ ID NO:3, exemplary amino acid modifications correspond to any of Y3I, Q18S, Q18N, K19N, L20I, L20V, L21I, L21V, K33N, D34N, K33N, P41A, P41S, E42N, E43N, K45D, K45N, Q48H, Q48S, Q48T, Q49H, Q49S, Q49T, F50I, F50V, Q51H, Q51S, Q51T, Q51N, K52D, K52N, E53N, D54G, L57I, Y60I, E61K, E61H, E61N, M62I, M62V, Q64H, Q64S, Q64T, F70I, F70V, Q72H, Q72S, E85N, L88I, L88V, L98I, L98V, K99N, E103N, E104N, K105D, K105N, L106I, L106V, E107N, E109N, K115D, K115N, K115S, K115H, M117I, M117V, L122I, L122V, K123N, Y125I, Y126I, Y132I, K134N, Y136N, R147H, R147Q, E149H, E149N, L151I, L154V, and L160V, with reference to amino acid positions of a mature IFN-β polypeptide set forth in SEQ ID NO:1.

[0023] Such modifications of an IFN-β polypeptide typically include 1, 2, 3, 4, 5, 6, 7, 8, 9, 10, 11, 12, 13, 14, 15, 16, 17, 18, 19, or 20 modifications. IFN-β polypeptides that can be modified include mature forms (i.e. the polypeptide whose sequence is set forth in SEQ ID NO. 1) and precursor forms (i.e. the polypeptide whose sequence is set forth in SEQ ID NO. 2). A IFN-β polypeptide containing any one or more amino acid modifications such as is set forth above, can contain a further amino acid modification at amino acid positions corresponding to positions M1, Y3, L5, L6, F8, L9, Q10, R11, S12, S13, N14, F15, Q16, C17, Q18, K19, L20, L21, W22, Q23, L24, N25, R27, L28, E29, Y30, L32, K33, D34, R35, M36, F38, D39, E42, E43, K45, L47, Q48, Q49, K52, E53, D54, L57, Y60, E61, M62, L63, Q64, F67, R71, Q72, D73, G78, W79, N80, E81, T82, I83, E85, N86, L87, L88, A89, N90, V91, Y92, Q94, I95, H97, L98, K99, V101, L102, E103, E104, K105, L106, E107, K108, E109, D110, F111, R113, K115, L116, M117, L120, L122, K123, R124, Y125, Y126, R128, L130, Y132, L133, K134, N136, E137, Y138, W143, E149, L151, R152, F154, Y155, F156, R159, L160, Y163, L164, and R165 of a mature IFN-β polypeptide set forth in SEQ ID NO:1. For examples, amino acid replacements at any one of the further amino acid positions can include replacements of any of M1C (i.e. replacement of M by C at a position corresponding to amino acid position 1 of mature IFN-β (SEQ ID NO:1), M1D, M1E, M1K, M1N, M1R, M1S, M1V, M1I, M1T, M1A, M1Q, Y3H, L5V, L5I, L5T, L5Q, L5H, L5A, L5D, L5E, L5K, L5R, L5N, L5S, L6I, L6V, L6H, L6A, L6D, L6E, L6K, L6N, L6Q, L6R, L6S, L6T, L6C, F8I, F8V, F8D, F8E, F8K, F8R, L9V, L9I, L9T, L9Q, L9H, L9A, L9D, L9E, L9K, L9N, L9R, L9S, Q10D, Q10E, Q10K, Q10N, Q10R, Q10S, Q10T, Q10C, R11D, R11H, R11Q, S12D, S12E, S12K, S12R, S13D, S13E, S13K, S13N, S13Q, S13R, S13T, S13C, N14D, N14E, N14K, N14Q, N14R, N14S, N14T, F15D, F15E, F15K, F15R, F15I, F15V, Q16D, Q16E, Q16K, Q16N, Q16R, Q16S, Q16C, Q16T, C17D, C17E, C17K, C17N, C17Q, C17R, C17S, C17T, Q18H, Q18T, K19Q, K19T, K19S, K19H, L20H, L20A, L20N, L20Q, L20R, L20S, L20T, L20D, L20E, L20K, L21I, L21V, L21T, L21Q, L21H, L21A, W22D, W22E, W22K, W22R, W22S, W22H, Q23H, Q23S, Q23T, Q23N, Q23D, Q23E, Q23K, Q23R, L24I, L24V, L24T, L24Q, L24H, L24A, L24D, L24E, L24K, L24R, N25H, N25S, N25Q, R27H, R27Q, L28V, L28I, L28T, L28Q, L28H, L28A, E29N, E29Q, E29H, Y30H, Y30I, L32V, L32I, L32T, L32Q, L32H, L32A, K33Q, K33T, K33S, K33H, D34Q, D34G, R35H, R35Q, M36V, M36I, M36T, M36Q, M36A, F38I, F38V, D39N, D39Q, D39H, D39G, E42Q, E42H, E43K, E43Q, E43H, K45Q, K45T, K45S, K45H, L47V, L47I, L47T, L47Q, L47H, L47A, Q48N, Q49N, K52Q, K52T, K52S, K52H, E53R, E53Q, E53H, D54Q, L57V, L57T, L57Q, L57H, L57A, Y60H, E61Q, M62I, M62V, M62T, M62Q, M62A, L63V, L63T, L63Q, L63H, L63A, Q64N, F67I, F67V, R71H, R71Q, Q72N, D73N, D73H, D73G, D73Q, G78D, G78E, G78K, G78R, W79H, W79S, W79D, W79E, W79K, W79R, N80D, N80E, N80K, N80R, E81K, E81N, E81Q, E81H, T82D, T82E, T82K, T82R, I83D, I83E, I83K, I83R, I83N, I83Q, I83S, I83T, E85K, E85Q, E85H, N86D, N86E, N86K, N86R, N86Q, N86S, N86T, L87I, L87V, L87H, L87A, L87D, L87E, L87K, L87R, L87N, L87Q, L87S, L87T, L88T, L88Q, L88H, L88A, A89D, A89E, A89K, A89R, N90D, N90E, N90K, N90Q, N90R, N90S, N90T, N90C, V91D, V91E, V91K, V91N, V91Q, V91R, V91S, V91T, V91C, Y92H, Y92I, Q94D, Q94E, Q94K, Q94N, Q94R, Q94S, Q94T, Q94C, I95D, I95E, I95K, I95N, I95Q, I95R, I95S, I95T, H97D, H97E, H97K, H97N, H97Q, H97R, H97S, H97T, H97C, L98H, L98A, L98D, L98E, L98K, L98N, L98Q, L98R, L98S, L98T, L98C, K99Q, K99T, K99S, K99H, V101D, V101E, V101K, V101N, V101Q, V101R, V101S, V101T, V101C, L102I, L102V, L102T, L102Q, L102H, L102A, E103K, E103Q, E103H, E104R, E104Q, E104H, K105Q, K105T, K105S, K105H, L106T, L106Q, L106H, L106A, E107R, E107Q, E107H, K108D, K108N, K108Q, K108T, K108S, K108H, E109R, E109Q, E109H, D110K, D110N, D110Q, D110H, D110G, F111I, F111V, R113E, R113H, R113Q, K115Q, L116V, L116I, L116T, L116Q, L116H, L116A, M117I, M117V, M117T, M117Q, M117Q, M117A, L120V, L120I, L120T, L120Q, L120H, L120A, L122I, L122V, L122T, L122Q, L122H, L122A, K123Q, K123T, K123S, K123H, R124D, R124E, R124H, R124Q, Y125H, Y126H, R128H, R128Q, L130V, L130I, L130T, L130Q, L130H, L130A, Y132H, L133I, L133V, L133T, L133Q, L133H, L133A, K134Q, K134T, K134S, K134H, K136Q, K136T, K136S, K136H, E137N, E137Q, E137H, Y138H, Y138I, W143H, W143S, E149Q, L151V, L151T, L151Q, L151H, L151A, R152D, R152H, R152Q, F154I, Y155H, Y155I, F156I, F156V, R159H, R159Q, L160I, L160V, L160T, L160Q, L160H, L160A, Y163H, Y163I, L164I, L164V, L164T, L164Q, L164H, L164A, R165D, R165Q and R165H of a mature IFN-β polypeptide set forth in SEQ ID NO:1.

[0024] A modified IFN-β polypeptide containing one or more amino acid modification exhibits increased protein stability and retains one of more activities of the unmodified IFN-β polypeptide. Generally, increased protein stability is increased protein half-life in vitro or in vivo. Increased protein stability of the modified IFN-β polypeptide is the result only of modification to the primary sequence of the IFN-β polypeptide. In some cases, a modified IFN-β polypeptide provided herein also can include a further amino acid modification that contributes to deimmunization, glycosylation, or PEGylation of the polypeptide such that a modified polypeptide provided herein can be glycosylated or conjugated to a polyethylene glycol (PEG) moiety.

[0025] In some examples, an IFN-β polypeptide containing one or more amino acid modification exhibits increased protein stability manifested as increased protease resistance, increased conformational stability, or a combination thereof. For example, the one or more amino acid modifications can correspond to any of Y3H, Y3I, L6I, L6V, L6H, L6A, K19N, Q18S, Q18N, Q18H, Q18T, L20I, L20V, L20H, L20A, L21I, L21V, L21T, L21Q, L21H, L21A, Q23H, Q23S, Q23T, Q23N, L24I, L24V, L24T, L24Q, L24H, L24A, K33N, E29N, D34N, D34Q, D34G, F38I, F38V, D39N, P41A, P41S, E42N, E43Q, E43H, E43N, K45N, Q48N, Q48H, Q48S, Q48T, Q49N, Q49H, Q49S, Q49T, F50I, F50V, Q51H, Q51S, Q51T, Q51N, K52N, E53N, E53Q, E53H, D54N, D54Q, D54G, L57I, L57V, L57T, L57Q, L57H, Y60I, Y60H, E61H, E61N, E61Q, M62I, M62V, M62T, M62Q, L63I, L63V, L63T, L63Q, L63H, Q64N, Q64H, Q64S, Q64T, F70I, F70V, Q72H, Q72S, Q72T, Q72N, D73N, W79H, W79S, E81N, E85N, L87I, L87V, L87H, L87A, L88I, L88V, L88T, L88Q, L88H, L88A, L98I, L98V, L98H, L98A, K99N, L102I, L102V, L102T, L102Q, L102H, L102A, E103N, E104N, K105N, L106I, L106V, L106T, L106Q, L106H, L106A, E107N, K108N, E109N, D110N, K115N, K115S, K115H, K115Q, M117I, M117V, M117T, M117Q, M117A, L122I, L122V, L122T, L122Q, L122H, L122A, K123N, Y125I, Y125H, Y126I, Y126H, Y132I, Y132H, L133I, L133V, L133T, L133Q, L133H, K134N, K136N, E137N, W143H. W143S, R147H, R147Q, E149H, E149N, E149Q, L151I, L151V, L151T, L151Q, L151H, L151A, F154I, F154V, F156I, L160I, L160V, L160T, L160Q, L160H, L160A, L164T, L164Q, L164H, L164A L164I, and L164V of a mature IFN-β polypeptide set forth in SEQ ID NO:1, where increased protein stability is manifested as increased protease resistance. Exemplary SEQ ID NOS of modified IFN-β polypeptides exhibiting increased protease resistance are set forth in any of SEQ ID NOS: 4-68, 71-82, 84-87, 534-557, 559-606, and 608-650, or a biologically active portion thereof.

[0026] A modified IFN-β polypeptide provided herein that contains one or more amino acid modifications and exhibits increased protein stability manifested as increased resistance to a protease also can contain any one or more further amino acid modification at amino acid positions corresponding to positions M1, Y3, L5, L6, F8, L9, Q10, R11, S12, S13, N14, F15, Q16, C17, Q18, K19, L20, L21, W22, Q23, L24, N25, R27, L28, E29, Y30, L32, K33, D34, R35, M36, F38, D39, E42, E43, K45, L47, Q48, Q49, K52, E53, D54, L57, Y60, E61, M62, L63, Q64, F67, R71, Q72, D73, G78, W79, N80, E81, T82, I83, E85, N86, L87, L88, A89, N90, V91, Y92, Q94, I95, H97, L98, K99, V101, L102, E103, E104, K105, L106, E107, K108, E109, D110, F111, R113, K115, L116, M117, L122, K123, R124, Y125, Y126, R128, L130, Y132, L133, K134, K136, E137, Y138, W143, E149, L151, R152, Y155, F156, R159, L160, Y163, L164, and R165 of a mature IFN-β polypeptide set forth in SEQ ID NO:1. For examples, amino acid replacements at any one of the further amino acid positions can include replacements of any of M1V (i.e. replacement of M by V at a position corresponding to amino acid position 1 of mature IFN-β (SEQ ID NO:1), M1I, M1T, M1A, M1Q, M1D, M1E, M1K, M1N, M1R, M1S, M1C, Y3H, L5V, L5I, L5T, L5Q, L5H, L5A, L5D, L5E, L5K, L5R, L5N, L5S, L6H, L6A, L6I, L6V, L6D, L6E, L6K, L6N, L6Q, L6R, L6S, L6T, L6T, L6C, F8I, F8V, F8D, F8E, F8K, F8R, L9V, L9I, L9T, L9Q, L9H, L9A, L9D, L9E, L9K, L9N, L9R, L9S, Q10D, Q10E, Q10K, Q10N, Q10R, Q10S, Q10T, Q10C, R11H, R11Q, S12D, S12E, S12K, S12R, S13D, S13E, S13K, S13N, S13Q, S13R, S13T, S13C, N14D, N14E, N14K, N14Q, N14R, N14S, N14T, F15I, F15V, F15D, F15E, F15K, F15R, Q16D, Q16E, Q16K, Q16N, Q16R, Q16S, Q16T, Q16C, C17D, C17E, C17K, C17N, C17R, C17S, C17T, Q18H, Q18T, K19Q, K19T, K19S, K19H, L20H, L20A, L20N, L20Q, L20R, L20S, L20T, L20D, L20E, L20K, L21I, L21V, L21T, L21Q, L21H, L21A, W22S, W22H, W22D, W22E, W22K, W22R, Q23H, Q23S, Q23T, Q23N, Q23D, Q23E, Q23K, Q23R, L24T, L24Q, L24H, L24I, L24V, L24D, L24E, L24K, L24R, N25H, N25S, N25Q, R27H, R27Q, L28V, L28I, L28T, L28Q, L28H, L28A, E29N, E29Q, E29H, Y30H, Y30I, L32V, L32I, L32T, L32Q, L32H, L32A, K33Q, K33T, K33S, K33H, D34Q, D34G, R35H, R35Q, M36V, M36I, M36T, M36Q, M36A, F38I, F38V, D39N, D39Q, D39H, D39G, E42Q, E42H, E43Q, E43H, K45Q, K45T, K45S, K45T, L47V, L47I, L47T, L47Q, L47H, L47A, Q48N, Q49N, K52Q, K52T, K52S, K52H, E53Q, E53H, D54Q, L57T, L57Q, L57H, L57A, L57V, Y60H, E61Q, M62I, M62V, M62T, M62Q, M62A, L63T, L63Q, L63H, L63A, L63V, Q64N, F67I, F67V, R71H, R71Q, Q72T, Q72N, D73N, D73Q, D73H, D73G, G78D, G78E, G78K, G78R, W79H, W79S, N80D, N80E, N80K, N80R, E81N, E81Q, E81H, T82D, T82E, T82K, T82R, I83D, I83E, I83K, I83R, I83N, I83Q, I83S, I83T, E85 Q, E85H, N86D, N86E, N86K, N86R, N86Q, N86S, N86T, L87H, L87A, L88T, L88Q, L88H, L88A, L87I, L87V, L87D, L87E, L87K, L87R, L87N, L87Q, L87S, L87T, A89D, A89E, A89K, A89R, N90D, N90E, N90K, N90Q, N90R, N90S, N90T, N90C, V91D, V91E, V91K, V91N, V91Q, V91R, V91S, V91T, V91C, Y92H, Y92I, Q94D, Q94E, Q94K, Q94N, Q94R, Q94S, Q94T, Q94C, I95D, I95E, I95K, I95N, I95Q, 195R, I95S, I95T, H97D, H97E, H97K, H97N, H97Q, H97R, H97S, H97T, H97C, L98H, L98A, L98D, L98E, L98K, L98N, L98Q, L98R, L98S, L98T, L98C, K99Q, K99T, K99S, K99H, V101D, V101E, V101K, V101N, V101Q, V101R, V101S, V101T, V101C, L102T, L102Q, L102H, L102A, L102I, L102V, E103Q, E103H, E104Q, E104H, K105Q, K105T, K105S, K105H, L106T, L106Q, L106H, L106A, E107Q, E107H, K108N, K108Q, K108T, K108S, K108H, E109H, E109Q, D110N, D110Q, D110H, D110G, F111I, F111V, R113H, R113Q, K115Q, L116V, L116I, L116T, L116Q, L116H, L116A, M117I, M117V, M117T, M117Q, M117A, L122I, L122V, L122T, L122Q, L122H, L122A, K123Q, K123T, K123S, K123H, R124H, R124Q, Y125H, Y126H, R128H, R128Q, L130V, L130I, L130T, L130Q, L130H, L130A, L133T, L133Q, L133H, L133A, Y132I, K134Q, K134T, K134S, K134H, K136Q, K136T, K136S, K136H, E137N, E137Q, E137H, Y138H, Y138I, W143H, W143S, E149Q, L151T, L151Q, L151H, L151A, L151V, R152H, R152Q, F154V, F154I, Y155H, Y155I, F156I, F156V, R159H, R159Q, L160V, L160T, L160Q, L160H, L160A, L160I, Y163H, Y163I, L164T, L164Q, L164H, L164A, L164I, L164V, R165H, and R165Q.

[0027] Increased protease resistance of a modified IFN-β polypeptide containing one or more amino acid modifications can occur in serum, blood, saliva, digestive fluids, or in vitro when exposed to one or more proteases. Exemplary of proteases for which an IFN-β polypeptide is resistant are any of pepsin, trypsin, chymotrypsin, elastase, aminopeptidase, gelatinase B, gelatinase A, α-chymotrypsin, carboxypeptidase, endoproteinase Arg-C, endoproteinase Asp-N, endoproteinase Glu-C, endoproteinase Lys-C, luminal pepsin, microvillar endopeptidase, dipeptidyl peptidase, enteropeptidase, hydrolase, NS3, factor Xa, Granzyme B, thrombin, plasmin, urokinase, tPA and PSA.

[0028] In some examples, a modified IFN-β polypeptide containing one or more amino acid modifications exhibits increased protein stability due to increased protease resistance to gelatinase B. A modified IFN-β polypeptide that is resistant to gelatinase B includes amino acid modifications at positions containing any one or more amino acid of Phenylalanine (F), Leucine (L), Glutamic Acid (E), Tyrosine (Y), and Glutamine (Q). Exemplary amino acid modifications in an IFN-β polypeptide to confer resistance to gelatinase B correspond to modifications of any of Y3I, Y3H, L6I, L6V, L6H, L6A, Q18S, Q18N, Q18H, Q18T, L20I, L20V, L20H, L20A, L21I, L21V, L21T, L21Q, L21H, L21A, Q23H, Q23S, Q23T, Q23N, L24I, L24V, L24T, L24Q, L24H, L24A, E29N, F38I, F38V, E42N, E43N, E43Q, E43H, Q48H, Q48S, Q48T, Q48N, Q49H, Q49S, Q49T, Q49N, F50I, F50V, Q51H, Q51S, Q51T, Q51N, E53Q, E53H, E53N, L57I, L57V, L57T, L57Q, L57H, Y60H, Y60I, E61H, E61N, E61Q, L63I, L63V, L63T, L63Q, L63H, Q64H, Q64S, Q64T, Q64N, F70I, F70V, Q72H, Q72S, Q72T, Q72N, E81N, E85N, L87I, L87V, L87H, L87A, L88I, L88V, L88T, L88Q, L88H, L88A, L98I, L98V, L98H, L98A, L102I, L102V, L102T, L102Q, L102H, L102A, E103N, E104N, L106I, L106V, L106T, L106Q, L106H, L106A, E107N, E109N, Y125I, Y125H, Y126I, Y126H, Y132I, Y132H, L133I, L133V, L133T, L133Q, L133H, E137N, E149H, E149N, E149Q, L151I, L151V, L151T, L151Q, L151H, L151A, F154I, F154V, F156I, L160I, L160V, L160T, L160Q, L160H, L160A, L164I, L164V, L164H, L164A, L164T, and L164Q of a mature IFN-β polypeptide set forth in SEQ ID NO:1. SEQ ID NOS of exemplary modified IFN-β polypeptides that are modified to be resistant to gelatinase B are set forth in any of SEQ ID NOS: 4-13, 16, 17, 20-27, 30-36, 39-42, 45-54, 61-68, 75-82, 84-87, 537-547, 551, 555-557, 562-564, 567-576, 578-583, 585-589, 591, 604-606, and 610-650, or a biologically active portion thereof.

[0029] A modified IFN-β polypeptide provided herein that contains one or more amino acid modifications and exhibits increased protein stability manifested as increased protease resistance to gelatinase B also can contain any one or more further amino acid modification at amino acid positions corresponding to positions Y3, L5, L6, F8, L9, Q10, F15, Q16, Q18, L20, L21, Q23, L28, E29, Y30, L32, F38, E42, E43, L47, Q48, Q49, E53, L57, Y60, E61, L63, Q64, F67, Q72, E81, E85, L87, L88, Y92, Q94, L98, L102, E103, E104, L106, E107, E109, F111, L116, L120, Y125, Y126, L130, Y132, L133, E137, Y138, E149, L151, F154, F156, L160, Y163, and L164 of a mature IFN-β polypeptide set forth in SEQ ID NO:1. For examples, amino acid replacements at any one of the further amino acid positions can include replacements of any of Y3H (i.e. replacement of Y by H at a position corresponding to amino acid position 3 of mature IFN-β (SEQ ID NO:1)), L5V, L5I, L5T, L5Q, L5H, L5A, L5D, L5E, L5K, L5R, L5N, L5S, L6I, L6V, L6H, L6A, L6D, L6E, L6K, L6N, L6Q, L6R, L6S, L6T, L6C, F8I, F8V, F8D, F8E, F8K, F8R, L9V, L9I, L9T, L9Q, L9H, L9A, L9D, L9E, L9K, L9N, L9R, L9S, Q10D, Q10E, Q10K, Q10N, Q10R, Q10S, Q10T, Q10C, F15I, F15V, F15D, F15E, F15K, F15R, Q16D, Q16E, Q16K, Q16N, Q16R, Q16S, Q16T, Q16C, Q18H, Q18T, L20H, L20A, L20N, L20Q, L20R, L20S, L20T, L20D, L20E, L20K, L21I, L21V, L21T, L21Q, L21H, L21A, Q23H, Q23S, Q23T, Q23N, Q23D, Q23E, Q23K, Q23R, L28V, L28I, L28T, L28Q, L28H, L28A, E29N, E29Q, E29H, Y30H, Y30I, L32V, L32I, L32T, L32Q, L32H, L32A, F38I, F38V, E42Q, E42H, E43Q, E43H, L47V, L47I, L47T, L47Q, L47H, L47A, Q48N, Q49N, E53Q, E53H, L57V, L57T, L57Q, L57H, L57A, Y60H, E61Q, L63V, L63T, L63Q, L63H, L63A, Q64N, F67I, F67V, Q72T, Q72N, E81N, E81Q, E81H, E85Q, E85H, L87I, L87V, L87H, L87A, L87D, L87E, L87, L87R, L87N, L87Q, L87S, L87T, L88T, L88Q, L88H, L88A, Y92H, Y92I, Q94D, Q94E, Q94K, Q94N, Q94R, Q94S, Q94T, Q94C, L98H, L98A, L98D, L98E, L98K, L98N, L98Q, L98R, L98S, L98T, L98C, L102I, L102V, L102T, L102Q, L102H, L102A, E103Q, E103H, E104Q, E104H, L106T, L106Q, L106H, L106A, E107Q, E107H, E109H, E109Q, F111I, F111V, L116V, L116I, L116T, L116Q, L116H, L116A. L116V, L116I, L116T, L116Q, L116H, L116A, Y125H, Y126H, L130V, L130I, L130T, L130Q, L130H, L130A, Y132H, L133I, L133V, L133T, L133Q, L133H, L133A, E137N, E137Q, E137H, Y138H, Y138I, E149Q, L151V, L151T, L151Q, L151H, L151A, F154I, F156I, F156V, L160I, L160V, L160T, L160Q, L160H, L160A, Y163H, Y163I, L164I, L164V, L164T, L164Q, L164H, and L164A of a mature IFN-β polypeptide set forth in SEQ ID NO:1.

[0030] In other examples, a modified IFN-β polypeptide exhibits increase protein stability manifested as increased conformational stability. Such a polypeptide can contain any one or more amino acid modifications corresponding to modification of any one or more of R11D, E43K, K45D, K52D, E53R, D54K, E61K, E81K, E85K, E103K, E104R, K105D, E107R, E109R, D110K, R113E, K115Q, K115D, R124D, R124E, R152D, and R165D in a mature IFN-β polypeptide set forth in SEQ ID NO:1. Exemplary sequences of such polypeptides are set forth in any one of SEQ ID NOS: 56, and 134-153 or a biologically active portion thereof.

[0031] Increased conformational stability exhibited by a modified IFN-β polypeptide containing one or more amino acid modification provided herein can be due to a change in the isoelectric point of the polypeptide. For example, the isoelectric point of a modified IFN-β polypeptide is increased due to replacement of one or more of a Glutamic Acid (E) or an Aspartic Acid (D) with a Lysine or an Arginine (R). Exemplary of modified IFN-β polypeptides provided herein exhibiting increased protein stability manifested as increased conformational stability due to a modification that increases the isoelectric point of the polypeptide are polypeptides with one or more amino acid modification corresponding to E43K, E53R, D54K, E61K, E81K, E85K, E103K, E104R, E107R, E109R, and D110K of a mature IFN-β polypeptide set forth in SEQ ID NO:1.

[0032] In other examples, increased conformational stability of an IFN-β polypeptide provided herein is due to amino acid modifications that decrease the isoelectric point of the polypeptide. For example, the isoelectric point of a modified IFN-β polypeptide is decreased due to replacement of one or more of a Lysine (K) or an Arginine (R) with a Glutamine (Q), Glutamic Acid (E) or Aspartic Acid (D). Exemplary of modified IFN-β polypeptides provided herein exhibiting increased protein stability manifested as increased conformational stability due to a modification that decreases the isoelectric point of the polypeptide are polypeptides with one or more amino acid modification corresponding to K115Q, R11D, K45D, K52D, K105D, K108D, R113E, K115D, R124D, R124E, R152D, and R165D of a mature IFN-β polypeptide set forth in SEQ ID NO:1.

[0033] A modified IFN-β polypeptide provided herein that has a decreased isoelectric point compared to an unmodified IFN-β polypeptide also can contain one or more further amino acid modification at amino acid positions corresponding to positions R11, K45, K52, K105, K108, R113, K115Q, R124, R152, and R165 of a mature IFN-β polypeptide set forth in SEQ ID NO:1. For example, amino acid replacements at any one of the further amino acid positions can include replacements of any of R11Q (i.e. replacement of R by Q at a position corresponding to amino acid position 11 of mature IFN-β (SEQ ID NO:1), R11D, K45Q, K52Q, K105Q, K108Q, K108D, R113Q, R113E, K115Q, R124Q, R124D, R124E, R152Q, R152D, R165Q, and R165D of a mature IFN-β polypeptide set forth in SEQ ID NO:1.

[0034] Provided herein are modified IFN-β polypeptides containing two or more amino acid modification corresponding to modifications at any two or more positions of Y3, L6, R11, Q18, K19, L20, L21, Q23, L24, E29, K33, D34, F38, D39, P41, E42, E43, K45, Q48, Q49, F50, Q51, K52, E53, D54, L57, Y60, E61, M62, L63, Q64, F70, Q72, D73, W79, E81, E85, L87, L88, L98, K99, L102, E103, E104, K105, L106, E107, K108, E109, D110, R113, K115, M117, L122, K123, R124, Y125, Y126, Y132, L133, K134, K136, E137, W143, R147, E149, L151, R152, F154, F156, L160, L164, and R165 of a mature IFN-β polypeptide set forth in SEQ ID NO:1. For example, amino acid replacements at any two or more of the amino acid positions can include replacements of any of Y3 I (i.e. replacement of Y by I at a position corresponding to amino acid position 3 of mature IFN-β (SEQ ID NO:1)), Y3H, L6I, L6V, L6H, L6A, R11D, Q18H, Q18S, Q18T, Q18N, K19N, L20I, L20V, L20H, L20A, L21I, L21V, L21T, L21Q, L21H, L21A, Q23H, Q23S, Q23T, Q23N, L24I, L24V, L24T, L24Q, L24H, L24A, E29N, K33N, D34N, D34Q, D34G, F38I, F38V, D39N, P41A, P41S, E42N, E43K, E43Q, E43H, E43N, K45D, K45N, Q48H, Q48S, Q48T, Q48N, Q49H, Q49S, Q49T, Q49N, F50I, F50V, Q51H, Q51S, Q51T, Q51N, K52D, K52N, E53R, E53Q, E53H, E53N, D54G, L57I, L57V, L57T, L57Q, L57H, L57A, Y60H, Y60I, E61K, E61Q, E61H, E61N, M62I, M62V, M62T, M62Q, M62H, M62A, L63I, L63V, L63T, L63Q, L63H, L63A, Q64H, Q64S, Q64T, Q64N, F70I, F70V, Q72H, Q72S, Q72T, Q72N, D73N, W79H, W79S, E81K, E81N, E85K, E85N, L87I, L87V, L87H, L87A, L88I, L88V, L88T, L88Q, L88H, L88A, L98I, L98V, L98H, L98A, K99N, L102I, L102V, L102T, L102Q, L102H, L102A, E103K, E103N, E104R, E104N, K105D, K105N, L106I, L106V, L106T, L106Q, L106H, L106A, E107R, E107N, K108D, K108N, E109R, E109N, D110K, D110N, R113E, K115D, K115Q, K115N, K115S, K115H, M117I, M117V, M117T, M117Q, M117A, L122I, L122V, L122T, L122Q, L122H, L122A, K123N, R124D, R124E, Y125H, Y125I, Y126H, Y126I, Y132H, Y132I, L133I, L133V, L133T, L133Q, L133H, L133A, K134N, K136N, E137N, W143H, W143S, R147H, R147Q, E149Q, E149H, E149N, L151I, L151V, L151T, L151Q, L151H, L151A, R152D, F154I, F154V, F156I, F156V, L160I, L160V, L160T, L160Q, L160H, L160A, L164I, L164V, L164T, L164Q, L164H, L164A, R165D of a mature IFN-β polypeptide set forth in SEQ ID NO:1.

[0035] Such a modification of an IFN-β polypeptide at two or more positions set forth above can be in a mature human IFN-β polypeptide of SEQ ID NO:1, or its precursor form set forth in SEQ ID NO:2. Modification also be can in a recombinant IFN-β polypeptide set forth in SEQ ID NO:3. It also is understood that amino acid modification of an IFN-β polypeptide can be in an allelic, species, or isoform variant of SEQ ID NO:1, where the allelic or species variant has 40%, 50%, 60%, 70%, 80%, 90%, 91%, 92%, 93%, 94%, 95%, 96%, 97%, 98%, or 99% sequence identity to the polypeptide set forth in SEQ ID NO:1, excluding the modified positions.

[0036] Such a modified IFN-β polypeptide provided herein that contains two or more amino acid modifications exhibits increased protein stability, and typically also retains its activity. Generally, increased protein stability is increased protein half-life in vitro or in vivo. Increased protein stability of the modified IFN-β polypeptide is the result only of modification to the primary sequence of the IFN-β polypeptide. In some cases, a modified IFN-β polypeptide provided herein also can include a further amino acid modification that contributes to deimmunization, glycosylation, or PEGylation of the polypeptide such that a modified polypeptide provided herein can be glycosylated or conjugated to a polyethylene glycol (PEG) moiety. Also, a modified IFN-β polypeptide provided herein containing two or more amino acid modifications exhibits increased protein stability manifested as protease resistance, increased conformational stability, or any combination thereof.

[0037] A modified IFN-β polypeptide provided herein that contains two or more amino acid modifications set forth above can have 2, 3, 4, 5, 6, 7, 8, 9, 10, 11, 12, 13, 14, 15, 16, 17, 18, 19, or 20 modifications. IFN-β polypeptides that can be modified by two or mutations include mature forms (i.e. the polypeptide whose sequence is set forth in SEQ ID NO. 1) and precursor forms (i.e. the polypeptide whose sequence is set forth in SEQ ID NO. 2). An IFN-β polypeptide containing any two or more amino acid modifications such as is set forth above, can contain a further amino acid modification at amino acid positions corresponding to positions M1, L5, L6, F8, L9, Q10, R11, S12, S13, N14, F15, Q16, C17, K19, L20, W22, Q23, L24, N25, R27, L28, E29, Y30, L32, K33, R35, M36, D39, E42, K45, L47, K52, F67, R71, D73, G78, W79, N80, E81, T82, I83, E85, N86, L87, A89, N90, V91, Y92, Q94, I95, H97, L98, K99, V10, E103, E104, K105, E107, K108, E109, D110, F111, R113, L116, L120, K123, R124, R128, L130, K134, K136, E137, Y138, R152, Y155, R159, Y163, and R165 of a mature IFN-β polypeptide set forth in SEQ ID NO:1. For example, amino acid replacements at any one of the further amino acid positions can include replacements of any of M1V (i.e. replacement of M by V at a position corresponding to amino acid position 1 of mature IFN-β (SEQ ID NO:1), M1V, M1I, M1T, M1A, M1Q, M1D, M1E, M1K, M1N, M1R, M1S, M1C, L5V, L5I, L5T, L5Q, L5H, L5A, L5D, L5E, L5K, L5R, L5N, L5S, L6D, L6E, L6K, L6N, L6Q, L6R, L6S, L6T, L6T, L6C, F8I, F8V, F8D, F8E, F8K, F8R, L9V, L9I, L9T, L9Q, L9H, L9A, L9D, L9E, L9K, L9N, L9R, L9S, Q10D, Q10E, Q10K, Q10N, Q10R, Q10S, Q10T, Q10C, R11H, R11Q, S12D, S12E, S12K, S12R, S13D, S13E, S13K, S13N, S13Q, S13R, S13T, S13C, N14D, N14E, N14K, N14Q, N14R, N14S, N14T, F15I, F15V, F15D, F15E, F15K, F15R, Q16D, Q16E, Q16K, Q16N, Q16R, Q16S, Q16T, Q16C, C17D, C17E, C17K, C17N, C17R, C17S, C17T, K19Q, K19T, K19S, K19H, L20N, L20Q, L20R, L20S, L20T, L20D, L20E, L20K, W22S, W22H, W22D, W22E, W22K, W22R, Q23D, Q23E, Q23K, Q23R, L24D, L24E, L24K, L24R, N25H, N25S, N25Q, R27H, R27Q, L28V, L28I, L28T, L28Q, L28H, L28A, E29Q, E29H, Y30H, Y30I, L32V, L32I, L32T, L32Q, L32H, L32A, K33Q, K33T, K33S, K33H, R35H, R35Q, M36V, M36I, M36T, M36Q, M36A, D39Q, D39H, D39G, E42Q, E42H, K45Q, K45T, K45S, K45T, L47V, L47I, L47T, L47Q, L47H, L47A, K52Q, K52T, K52S, K52H, F67I, F67V, R71H, R71Q, D73Q, D73H, D73G, G78D, G78E, G78K, G78R, N80D, N80E, N80K, N80R, E81Q, E81H, T82D, T82E, T82K, T82R, I83D, I83E, I83K, I83R, I83N, I83Q, I83S, I83T, E85Q, E85H, N86D, N86E, N86K, N86R, N86Q, N86S, N86T, L87D, L87E, L87K, L87R, L87N, L87Q, L87S, L87T, A89D, A89E, A89K, A89R, N90D, N90E, N90K, N90Q, N90R, N90S, N90T, N90C, V91D, V91E, V91K, V91N, V91Q, V91R, V91S, V91T, V91C, Y92H, Y92I, Q94D, Q94E, Q94K, Q94N, Q94R, Q94S, Q94T, Q94C, I95D, I95E, I95K, I95N, I95Q, I95R, I95S, I95T, H97D, H97E, H97K, H97N, H97Q, H97R, H97S, H97T, H97C, L98D, L98E, L98K, L98N, L98Q, L98R, L98S, L98T, L98C, K99Q, K99T, K99S, K99H, V101D, V101E, V101K, V101N, V101Q, V101R, V101S, V101T, V101C, E103Q, E103H, E104Q, E104H, K105Q, K105T, K105S, K105H, E107Q, E107H, K108Q, K108T, K108S, K108H, E109H, E109Q, D110Q, D110H, D110G, F111I, F111V, R113H, R113Q, L116V, L116I, L116T, L1116Q, L116H, L116A, L120V, L120I, L120T, L120Q, L120H, L120A, K123Q, K123T, K123S, K123H, R124H, R124Q, R128H, R128Q, L130V, L130I, L130T, L130Q, L130H, L130A, K134Q, K134T, K134S, K134H, K136Q, K136T, K136S, K136H, E137Q, E137H, Y138H, Y138I, R152H, R152Q, Y155H, Y155I, R159H, R159Q, Y163H, Y163I, R165H, and R165Q of a mature IFN-β polypeptide.

[0038] Provided herein are modified IFN-β polypeptides exhibiting increased conformational stability containing two or more amino acid modifications corresponding to modifications at any two or more positions of M1, L5, L6, F8, L9, Q10, R11, S12, S13, N14, F15, Q16, C17, L20, W22, Q23, L24, E43, K45, K52, E53, D54, E61, G78, W79, N80, E81, T82, I83, E85, N86, L87, A89, N90, V91, Q94, I95, H97, L98, V101, E103, E104, K105, E107, K108, E109, D110, R113, K115, R124, R152, and R165 of a mature IFN-β polypeptide set forth in SEQ ID NO:1. For example, amino acid replacements at any two or more of the amino acid positions can include replacements of any of M1E (i.e. replacement of M by E at a position corresponding to amino acid position 1 of mature IFN-β (SEQ ID NO:1)), M1D, M1K, M1R, M1N, M1Q, M1S, M1T, M1C, L5E, L5D, L5K, L5R, L5N, L5Q, L5S, L5T, L6C, F8E, F8D, F8K, F8R, L9E, L9D, L9K, L9R, L9N, L9Q, L9S, L9T, Q10C, Q10E, Q10D, Q10K, Q10R, Q10N, Q10S, Q10T, R11Q, R11D, S12E, S12D, S12K, S12R, S13E, S13D, S13K, S13R, S13N, S13Q, S13T, S13C, N14E, N14D, N14K, N14R, N14Q, N14S, N14T, F15E, F15D, F15K, F15R, Q16E, Q16D, Q16K, Q16R, Q16N, Q16S, Q16T, Q16C, C17E, C17D, C17K, C17R, C17N, C17Q, C17S, C17T, L20E, L20D, L20K, L20R, L20N, L20Q, L20S, L20T, W22E, W22D, W22K, W22R, Q23E, Q23D, Q23K, Q23R, L24E, L24D, L24K, L24R, E43K, K45Q, K45D, K52Q, K52D, E53R, D54K, E61K, G78E, G78D, G78K, G78R, W79E, W79D, W79K, W79R, N80E, N80D, N80K, N80R, E81K, T82E, T82D, T82K, T82R, I83E, I83D, I183K, I83R, I83N, I83Q, I83S, I83T, E85K, N86E, N86D, N86K, N86R, N86Q, N86S, N86T, L87E, L87D, L87K, L87R, L87N, L87Q, L87S, L87T, A89E, A89D, A89K, A89R, N90E, N90D, N90K, N90R, N90Q, N90S, N90T, N90C, V91E, V91D, V91K, V91R, V91N, V91Q, V91S, V91T, V91C, Q94E, Q94D, Q94K, Q94R, Q94N, Q94S, Q94T, Q94C, I95E, I95D, I95K, I95R, I95N, I95Q, I95S, I95T, H97E, H97D, H97K, H97R, H97N, H97Q, H97S, H97T, H97C, L98E, L98D, L98K, L98R, L98N, L98Q, L98S, L98T, L98C, V101C, V101E, V101D, V101K, V101R, V101N, V101Q, V101S, V101T, E103K, E104R, K105Q, K105D, E107R, K108Q, K108D, E109R, D110K, R113Q, R113E, K115Q, K115D, R124Q, R124D, R124E, R152Q, R152D, R165Q, and R165D of a mature IFN-β polypeptide set forth in SEQ ID NO:1.

[0039] Such a modification of an IFN-β polypeptide at two or more positions set forth above that confers increased conformational stability can be in a mature human IFN-β polypeptide of SEQ ID NO:1, or its precursor form set forth in SEQ ID NO:2. Modification also be can in a recombinant IFN-β polypeptide set forth in SEQ ID NO:3. It also is understood that amino acid modification of an IFN-β polypeptide can be in an allelic, species, or isoform variant of SEQ ID NO:1, where the allelic or species variant has 40%, 50%, 60%, 70%, 80%, 90%, 91%, 92%, 93%, 94%, 95%, 96%, 97%, 98%, or 99% sequence identity to the polypeptide set forth in SEQ ID NO:1, excluding the modified positions.

[0040] In one example, a modified IFN-β polypeptide that exhibits increased conformational stability due to two or more amino acid modifications contains 2, 3, 4, 5, 6, 7, 8, 9, 10, 11, 12, 13, 14, 15, 16, 17, 18, 19, or 20 modifications. IFN-β polypeptides that can be modified to increase conformational stability include mature forms (i.e. the polypeptide whose sequence is set forth in SEQ ID NO. 1) and precursor forms (i.e. the polypeptide whose sequence is set forth in SEQ ID NO. 2). Typically, the increased conformational stability of the polypeptide is due to modifications only in the primary sequence of the polypeptide. A modified IFN-β polypeptide provided herein, however, also can contain one or more additional amino acid modification contributing to deimmunization, glycosylation, or PEGylation of the polypeptide. In some instances, a modified polypeptide provided herein containing two or more amino acid modifications that confer increased conformational stability also are glycosylated or are conjugated to a polyethylene glycol (PEG) moiety.

[0041] Conformational stability of a modified IFN-β polypeptide provided herein can be due to the addition of charges to regions in helices A and C. Such a modified IFN-β polypeptide provided herein can contain two or more amino acid modifications such as any two or more modifications corresponding to any of L5E, L5D, L5K, L5R, F8E, F8D, F8K, F8R, L9E, L9D, L9K, L9R, S12E, S12D, S12K, S12R, F15E, F15D, F15K, F15R, Q16E, Q16D, Q16K, Q16R, L20E, L20D, L20K, L20R, W22E, W22D, W22K, W22R, Q23E, Q23D, Q23K, Q23R, L24E, L24D, L24K, L24R, G78E, G78D, G78K, G78R, W79E, W79D, W79K, W79R, N80E, N80D, N80K, N80R, T82E, T82D, T82K, T82R, 183E, I83D, I83K, I83R, N86E, N86D, N86K, N86R, L87E, L87D, L87K, L87R, A89E, A89D, A89K, and A89R of a mature IFN-β polypeptide set forth in SEQ ID NO:1.

[0042] Conformational stability of a modified IFN-β polypeptide provided herein also can be due to increased polar interactions between helices A and C. Such a modified IFN-β polypeptide provided herein can contain two or more amino acid modifications such as any two or more modifications corresponding to any of M1E, M1D, M1K, M1R, M1N, M1Q, M1S, M1T, L5E, L5D, L5K, L5R, L5N, L5Q, L5S, L5T, L6E, L6D, L6K, L6R, L6N, L6Q, L6S, L6T, L9E, L9D, L9K, L9R, L9N, L9Q, L9S, L9T, Q10E, Q10D, Q10K, Q10R, Q10N, Q10S, Q10T, S13E, S13D, S13K, S13R, S13N, S13Q, S13T, N14E, N14D, N14K, N14R, N14Q, N14S, N14T, Q16E, Q16D, Q16K, Q16R, Q16N, Q16S, Q16T, C17E, C17D, C17K, C17R, C17N, C17Q, C17S, C17T, L20E, L20D, L20K, L20R, L20N, L20Q, L20S, L20T, I83E, I83D, I83K, I83R, I83N, I83Q, I83S, I83T, N86E, N86D, N86K, N86R, N86Q, N86S, N86T, L87E, L87D, L87K, L87R, L87N, L87Q, L87S, L87T, N90E, N90D, N90K, N90R, N90Q, N90S, N90T, V91E, V91D, V91K, V91R, V91N, V91Q, V91S, V91T, Q94E, Q94D, Q94K, Q94R, Q94N, Q94S, Q94T, I95E, I95D, I95K, I95R, I95N, I95Q, I95S, I95T, H97E, H97D, H97K, H97R, H97N, H97Q, H97S, H97T, L98E, L98D, L98K, L98R, L98N, L98Q, L98S, L98T, V101E, V101D, V101K, V101R, V101N, V101Q, V101S, and V101T of a mature IFN-β polypeptide set forth in SEQ ID NO:1.

[0043] In addition, conformational stability of a modified IFN-β polypeptide provided herein can be due to the introduction of a disulfide bridge in the IFN-β polypeptide. Such a modified IFN-β polypeptide provided herein can contain two or more amino acid modifications such as any two or more modifications corresponding to any of M1C, L6C, Q10C, S13C, Q16C, N90C, V91C, Q94C, H97C, L98C, and V101C of a mature IFN-β polypeptide set forth in SEQ ID NO:1. Disulfide bridges can be formed between the following positions: C1-C101, C6-C98, C16-C90, C10-C97, C10-C98, C13-C94. Exemplary sequences of modified IFN-β polypeptides containing a disulfide bridge are set forth in any of SEQ ID NOS: 126-128, 130, 132, and 133 or a biologically active portion thereof.

[0044] Alteration of the isoelectric point of an IFN-β polypeptide also increases the conformational stability of modified IFN-β polypeptides provided herein. Such a modified IFN-β polypeptide provided herein exhibiting an increased isoelectric point can contain two or more amino acid modifications such as any two or more modifications corresponding to any of E43K, E53R, D54K, E61K, E81K, E85K, E103K, E104R, E107R, E109R, and D110K. In another example, a modified IFN-β polypeptide provided herein exhibiting a decreased isoelectric point can contain two or more amino acid modifications such as any two or more modifications corresponding to any of R11D, R11Q, K45D, K45Q, K52D, K52Q, K105D, K105Q, K108D, K108Q, R113E, R113Q, K115D, K115Q, R124D, R124Q, R124E, R152D, R152Q, R165Q, and R165D of a mature IFN-β polypeptide set forth in SEQ ID NO:1.

[0045] Provided herein are any of the above modified IFN-β polypeptides, wherein the one or more amino acid modifications are selected from among natural amino acids, non-natural amino acids and a combination of natural and non-natural amino acids. The modified IFN-β polypeptide can be a naked polypeptide chain. Modified IFN-β polypeptide is a polypeptide that can include one or more modifications provided herein and one or more additional amino acid modifications that reduce the immunogenicity of the polypeptide. Methods for effecting modification of polypeptides to reduce immunogenicity are known in the art.

[0046] In some examples, the modified IFN-β polypeptide is a polypeptide complex in which the IFN-β polypeptide is pegylated, albuminated, and/or glycosylated.

[0047] Provided herein are any of the above modified IFN-β polypeptides, further containing one or more pseudo-wild type mutations. In one embodiment, the pseudo-wild-type mutations include, but are not limited to, one or more of insertions, deletions or replacements of the amino acid residue(s) of the unmodified IFN-β polypeptide.

[0048] Provided herein are any of the above modified IFN-β that exhibit increased resistance to proteolysis by one or more proteases. In one embodiment, the increased resistance to proteolysis is to one or more proteases that occur in serum, blood, saliva, digestive fluids and/or in vitro. The increased resistance to proteolysis is exhibited by the modified IFN-β when it is administered intravenously, orally, nasally, pulmonarily, or is present in the digestive tract. Such modified IFN-β polypeptides exhibit increased resistance to proteolysis by one or more proteases compared to the unmodified IFN-β. Exemplary proteases include, but are not limited to, gelatinase A, gelatinase B, pepsin, trypsin, trypsin (Arg blocked), trypsin (Lys blocked), clostripain, endoproteinase Asp-N, chymotrypsin, cyanogen bromide, iodozobenzoate, Myxobacter P., Armillaria, luminal pepsin, microvillar endopeptidase, dipeptidyl peptidase, enteropeptidase and hydrolase.

[0049] Provided herein are modified IFN-β polypeptides that exhibit increased conformational stability. Increased conformational stability can confer on a polypeptide increased thermal tolerance, increased tolerance to pH, and/or increased tolerance to a denaturating agent. In some instances, the modified IFN-β has increased thermal tolerance at a temperature from at or about 20° C. to at or about 45° C. In a particular example, the modified IFN-β has increased thermal tolerance at a body temperature of a subject (e.g., at or about 37° C.).

[0050] Provided herein are any of the above modified IFN-β polypeptides, in which the increased protein stability is manifested as an increased half-life in vivo or in vitro. In one example, the increased stability is manifested as an increased half-life when administered to a subject. In another example, the modified IFN-β has a half-life increased by at least 10%, at least 20%, at least 30%, at least 40%, at least 50%, at least 60%, at least 70%, at least 80%, at least 90%, at least 100%, at least 150%, at least 200%, at least 250%, at least 300%, at least 350%, at least 400%, at least 450% and at least 500% or more compared to the half-life of unmodified IFN-β. In other examples, the modified IFN-β also has a half-life increased by at least 1.5 times, 2 times, 3 times, 4 times, 5 times, 6 times, 7 times, 8 times, 9 times, 10 times, 20 times, 30 times, 40 times, 50 times, 60 times, 70 times, 80 times, 90 times, 100 times, 200 times, 300 times, 400 times, 500 times, 600 times, 700 times, 800 times, 900 times and 1000 times, or more times when compared to the half-life of unmodified IFN-β.

[0051] Provided herein are any of the above modified IFN-β polypeptides exhibiting increased activity compared to the unmodified IFN-β. Provided herein are any of the above modified IFN-β polypeptides exhibiting decreased activity compared to the unmodified IFN-β. Activity can be assessed, for example, by measuring cell proliferation in vitro, measuring anti-viral activity in vitro or in vivo, measuring natural killer cell activation, or measuring markers of IFN-β activity. The results of such assays correlate with an in vivo activity and hence a biological activity.

[0052] In one example, any of the above modified IFN-β polypeptides exhibits increased protease resistance, increased conformational stability (assessed, for example, as increased thermal tolerance), or any combinations thereof. In some cases, the modified IFN-β exhibits increased resistance to proteolysis and exhibits decreased thermal tolerance compared to the unmodified IFN-β. Alternatively, in another case, the modified IFN-β exhibits increased thermal tolerance and exhibits decreased resistance to proteolysis compared to the unmodified IFN-β. In still other instances, the modified IFN-β polypeptide exhibits increased resistance to proteolysis and increased thermal tolerance.

[0053] Provided herein are any of the above modified IFN-β polypeptides that is a precursor polypeptide containing a signal peptide. In one example, the signal sequence is amino acids 1-21 of the sequence of amino acids set forth in SEQ ID NO: 2. Provided herein are any of the above modified IFN-β polypeptides that do not have a signal peptide. Such a modified IFN-β polypeptide is a mature polypeptide. In cases, the modified IFN-β polypeptides provided herein are secreted. Such a secreted polypeptide had a signal sequence that was processed prior to secretion, and possibly also contains other post-translational modifications, such as for example, glycosylation.

[0054] It is understood that modifications are with reference to the amino acid numbering of SEQ ID NO:1. Modifications contemplated include, however, mature IFN-β polypeptide of SEQ ID NO:1 as well as in its precursor form set forth in SEQ ID NO:2, and in a form of IFN-β set forth in SEQ ID NO:3. Additionally, corresponding loci on other species of IFN-β polypeptides and allelic variants readily can be identified. Furthermore, shortened or lengthened variants with insertions or deletions of amino acids, particularly at either terminus that retain an activity readily can be prepared and the loci for corresponding mutations identified.

[0055] In one example, provided herein is a modified cytokine structural homolog of a modified IFN-β as described herein containing one or more amino acid replacements in the cytokine structural homolog at positions corresponding to the 3-dimensional-structurally-similar positions within the 3-D structure of the modified IFN-β.

[0056] Provided herein are libraries (collections) of modified IFN-β polypeptides containing two, three, four, five, six, 10, 50, 100, 200 or more modified IFN-β polypeptides as described herein.

[0057] Provided herein are nucleic acid molecules containing a sequence of nucleotides encoding a modified IFN-β polypeptide as described herein. Provided herein are libraries (collections) of nucleic acid molecules comprising a plurality of the molecules as described herein.

[0058] Provided herein are vectors comprising the nucleic acid molecules. In one embodiment, the vectors are in a eukaryotic cell, a prokaryotic cell, an insect cell, a mammalian cell, etc. In some examples, the vectors are in a bacterial cell, a Chinese hamster ovary cell or an algal cell. Also provided herein are libraries containing a plurality of the vectors.

[0059] Provided herein are methods for expressing a modified IFN-β polypeptide comprising: i) introducing a nucleic acid encoding a modified IFN-β or a vector containing a nucleic acid encoding a modified IFN-β into a cell, and ii) culturing the cell under conditions in which the encoded modified IFN-β is expressed. In one embodiment, the nucleic acid or vectors are in a eukaryotic cell, a prokaryotic cell, an insect cell, a mammalian cell, etc. In some examples, the nucleic acid or vectors are in a bacterial cell, a Chinese hamster ovary cell or an algal cell. In one embodiment, the modified IFN-β is glycosylated.

[0060] Provided herein are pharmaceutical compositions including any of the modified IFN-β polypeptides described herein. In some examples, the modified IFN-β polypeptide containing composition also contains a pharmaceutically acceptable excipient, such as a binding agent, a filler, a lubricant, a disintegrant and a wetting agent.

[0061] In one example, the pharmaceutical compositions provided herein are formulated for oral, nasal or pulmonary administration. In a particular example, the pharmaceutical compositions are formulated for oral administration. In some instances, the modified IFN-β polypeptide in the pharmaceutical formulation exhibits increased half-life in the gastrointestinal tract under conditions selected from exposure to saliva, exposure to proteases in the gastrointestinal tract and exposure to low pH conditions compared to an unmodified IFN-β cytokine. Proteases include, but are not limited to one or more of a luminal pepsin, trypsin, chymotrypsin, elastase, aminopeptidase, gelatinase B, gelatinase A, α-chymotrypsin, carboxypeptidase, endoproteinase Arg-C, endoproteinase Asp-N, endoproteinase Glu-C, endoproteinase Lys-C, luminal pepsin, microvillar endopeptidase, dipeptidyl peptidase, enteropeptidase, hydrolase, NS3, factor Xa, Granzyme B, thrombin, plasmin, urokinase, tPA and PSA.

[0062] Provided in the pharmaceutical compositions herein are modified IFN-β polypeptides, wherein the modification includes removal of proteolytic digestion sites or increasing the conformational stability of the protein structure. In one example, the modified IFN-β in the pharmaceutical composition exhibits increased protein half-life or bioavailability in the gastrointestinal tract. Protein half-life can be increased in an amount of at least 10%, at least 20%, at least 30%, at least 40%, at least 50%, at least 50%, at least 60%, at least 70%, at least 80%, at least 90%, at least 100%, at least 150%, at least 200%, at least 250%, at least 300%, at least 350%, at least 400%, at least 450% or at least 500% or more compared to the half-life of wild-type protein. Alternatively, protein half-life can be increased in an amount of at least 6 times, at least 7 times, at least 8 times, at least 9 times, at least 10 times, at least 20 times, at least 30 times, at least 40 times, at least 50 times, at least 60 times, at least 70 times, at least 80 times, at least 90 times, at least 100 times, at least 200 times, at least 300 times, at least 400 times, at least 500 times, at least 600 times, at least 700 times, at least 800 times, at least 900 times or at least 1000 times or more compared to an unmodified protein.

[0063] Provided herein are pharmaceutical compositions prepared that do not contain added protease inhibitors, such as a Bowman-Birk inhibitor, a conjugated Bowman-Birk inhibitor, aprotinin and camostat.

[0064] Provided herein are pharmaceutical compositions formulated for oral administration in a form such as a liquid, a pill, a tablet or a capsule. In one example, the pill or tablet is chewable. In another example, the pill or tablet dissolves when exposed to saliva on the tongue or in the mouth. In an additional example, the capsule or tablet is a gastro-resistant capsule or tablet. In still other instances, the pharmaceutical composition in the capsule is in liquid form. In an example where the pharmaceutical composition is a liquid, the liquid can be, for example, a solution, a syrup or a suspension. In another example, the pharmaceutical composition in the capsule is in lyophilized form.

[0065] Provided herein are pharmaceutical compositions formulated for controlled release of the modified IFN-β polypeptide. In one such example, the pharmaceutical composition is in the form of a tablet or a lozenge. Lozenges deliver the modified IFN-β to the mucosa of the mouth, the mucosa of the throat or the gastrointestinal tract. Additionally, the lozenge can be formulated with an excipient, such as among anhydrous crystalline maltose and magnesium stearate.

[0066] Provided herein are pharmaceutical compositions formulated without protective compounds. In one such embodiment, the modified IFN-β exhibits resistance to gastrointestinal proteases including, but not limited to, gelatinase B.

[0067] Pharmaceutical compositions can be further formulated with one or more pharmaceutically-acceptable additives, such as a suspending agent, an emulsifying agent, a non-aqueous vehicle, and/or a preservative.

[0068] Provided herein are pharmaceutical compositions of nucleic acid molecules encoding any of the modified IFN-β polypeptides described herein or a vector containing a nucleic acid molecule encoding any of the modified IFN-β polypeptides described herein and a pharmaceutically acceptable excipient.

[0069] Provided herein are methods of treating a subject exhibiting symptoms of or having IFN-β-mediated disease or condition or disease or condition that is responsive to the administration of IFN-β by administering any of the pharmaceutical compositions described herein. Also provided herein are uses of a pharmaceutical composition provided herein for the treatment of an IFN-β-mediated disease or condition or disease or condition that is responsive to the administration of IFN-β. Also provided herein are uses of a modified IFN-β provided herein in the manufacture of a pharmaceutical composition for the treatment of an IFN-β-mediated disease or condition or disease or condition that is responsive to the administration of IFN-β. In one example, the IFN-β-mediated disease or condition or disease or condition that is responsive to the administration of IFN-β includes, but is not limited to viral infection, a proliferative disorder, an autoimmune disease, and an inflammatory disorder. In such an example where the disease to be treated is an autoimmune disease, the disease or condition can be, but is not limited to, any one of multiple sclerosis, rheumatoid arthritis, chronic viral hepatitis, hepatitis A, hepatitis B, and myocardial viral infection. In such another example where the disease to be treated is a proliferative disorder, the disease or condition can be, but is not limited to, a cancer or bone disorder. Exemplary of cancers to be treated with a pharmaceutical composition provided herein include uveal, melanoma, colon cancer, liver cancer, or metastatic cancer. Exemplary of a bone disorder is osteoporosis or osteopenia. In such a further example, where the disease to be treated is an inflammatory disorder, the disease or condition can be, but is not limited to, any of asthma, Guillain-Barre syndrome, and inflammatory bowel disease such as for example, ulcerative colitis or Crohn's disease. In an additional example, where the disease is a viral infection, the infection can be, but is not limited to, chronic viral hepatitis or myocardial infection.

[0070] Exemplary of diseases to be treated is multiple sclerosis. In one example, treatment can be by administration of a modified polypeptide provided herein that exhibits increased resistance to gelatinase B. Such modified polypeptides have a sequence of amino acids set forth in any of SEQ ID NOS: 4-11, 16, 17, 20-27, 30-36, 39-42, 45-54, 61-70, 75-87, 157, 158, 163-168, 173, 174, 180-185, 190-193, 198, 199, 204, 205, 209, 210, 213-224, 233-238, 247-250, 266-279, 282, 283, 295-310, 328-358, 377-387, 396-403, 408-411, 447-454, 474-479, 497-504, 540-542, 547, 551, 555-558, 562-576, 578-583, 585-589, 591, 604-607, 610-614, 616-650, 652, 653, 655, 656, and 658 as described herein, or a biologically active fragment thereof.

[0071] Provided herein are articles of manufacture including, but not limited to, packaging material and a pharmaceutical composition of a modified IFN-β polypeptide described herein contained within the packaging material. In a particular embodiment, the pharmaceutical composition packaged within the article of manufacture is effective for treatment of an IFN-β-mediated disease or disorder, and the packaging material includes a label that indicates that the modified IFN-β is used for treatment of an IFN-β-mediated disease or disorder.

[0072] Provided herein are kits including a pharmaceutical composition of a modified IFN-β polypeptide as described herein, a device for administration of the modified IFN-β polypeptide and optionally instructions for administration.

[0073] Provided herein are methods for producing a modified target protein, having an evolved predetermined property, wherein the evolved predetermined property is increased protein stability manifested as any one of increased protease resistance or increased conformational stability. In such examples, the increased protein stability of the IFN-β polypeptide that is evolved is due to amino acid modifications, such that only the primary sequence of the polypeptide is modified to confer the property. In one example, a method of increasing protein stability involves the step of introducing one or more amino acid modification that leads to the removal of proteolytic digestion sites such that the polypeptide exhibits increased protease resistance where the amino acid modifications are chosen from any one or more of Y3H, Y3I, L6I, L6V, L6H, L6A, Q18H, Q18S, Q18T, Q18N, K19N, L20I, L20V, L20H, L20A, L21I, L21V, L21T, L21Q, L21H, L21A, Q23H, Q23S, Q23T, Q23N, L24I, L24V, L24T, L24Q, L24H, L24A, E29N, K33N, D34N, D34Q, D34G, F38I, F38V, D39N, P41A, P41S, E42N, E43Q, E43H, E43N, K45N, Q48H, Q48S, Q48T, Q48N, Q49H, Q49S, Q49T, Q49N, F50I, F50V, Q51H, Q51S, Q51T, Q51N, K52N, E53Q, E53H, E53N, D54N, D54Q, D54G, L57I, L57V, L57T, L57Q, L57H, L57A, Y60H, Y60I, E61Q, E61H, E61N, M62I, M62V, M62T, M62Q, M62A, L63I, L63V, L63T, L63Q, L63H, L63A, Q64H, Q64S, Q64T, Q64N, F70I, F70V, Q72H, Q72S, Q72T, Q72N, D73N, W79H, W79S, E81N, E85N, L87I, L87V, L87H, L87A, L88I, L88V, L88T, L88Q, L88H, L88A, L98I, L98V, L98H, L98A, K99N, L102I, L102V, L102T, L102Q, L102H, L102A, E103N, E104N, K105N, L106I, L106V, L106T, L106Q, L106H, L106A, E107N, K108N, E109N, D110N, K115N, K115Q, K115S, K115H, M117I, M117V, M117T, M117Q, M117A, L122I, L122V, L122T, L122Q, L122H, L122A, K123N, Y125H, Y125I, Y126H, Y126I, Y132H, Y132I, L133I, L133V, L133T, L133Q, L133H, L133A, K134N, K136N, E137N, W143H, W143S, R147H, R147Q, E149Q, E149H, E149N, L151I, L151V, L151T, L151Q, L151H, L151A, F154I, F154V, F156I, F156V, L160I, L160V, L160T, L160Q, L160H, L160A, L164I, L164V, L164T, L164Q, L164H, and L164A of a mature IFN-β polypeptide set forth in SEQ ID NO:1.

[0074] In a particular example, a method of increasing protein stability involves the step of introducing one or more amino acid modification that leads to the removal of proteolytic digestion sites recognized by gelatinase B such that the polypeptide exhibits increased protease resistance to gelatinase B where the amino acid modifications are chosen from any one or more of Y3H, Y3I, L5V, L5I, L5T, L5Q, L5H, L5A, L5D, L5E, L5K, L5R, L5N, L5S, L6I, L6V, L6H, L6A, L6D, L6E, L6K, L6N, L6Q, L6R, L6S, L6T, L6C, F8I, F8V, F8D, F8E, F8K, F8R, L9V, L9I, L9T, L9Q, L9H, L9A, L9D, L9E, L9K, L9N, L9R, L9S, Q10D, Q10E, Q10K, Q10N, Q10R, Q10S, Q10T, Q10C, F15I, F15V, F15D, F15E, F15K, F15R, Q16D, Q16E, Q16K, Q16N, Q16R, Q16S, Q16T, Q16C, Q18H, Q18S, Q18T, Q18N, L20I, L20V, L20H, L20A, L20N, L20Q, L20R, L20S, L20T, L20D, L20E, L20K, L21I, L21V, L21T, L21Q, L21H, L21A, Q23H, Q23S, Q23T, Q23N, Q23D, Q23E, Q23K, Q23R, L28V, L28I, L28T, L28Q, L28H, L28A, E29N, E29Q, E29H, Y30H, Y30I, L32V, L32I, L32T, L32Q, L32H, L32A, F38I, F38V, E42N, E42Q, E42H, E43Q, E43H, E43N, L47V, L47I, L47T, L47Q, L47H, L47A, Q48H, Q48S, Q48T, Q48N, Q49H, Q49S, Q49T, Q49N, F50I, F50V, Q51H, Q51S, Q51T, Q51N, E53Q, E53H, E53N, L57I, L57V, L57T, L57Q, L57H, L57A, Y60H, Y60I, E61Q, E61H, E61N, L63I, L63V, L63T, L63Q, L63H, L63A, Q64H, Q64S, Q64T, Q64N, F67I, F67V, F70I, F70V, Q72H, Q72S, Q72T, Q72N, E81N, E81Q, E81H, E85N, E85Q, E85H, L87I, L87V, L87H, L87A, L87D, L87E, L87, L87R, L87N, L87Q, L87S, L87T, L88I, L88V, L88T, L88Q, L88H, L88A, Y92H, Y92I, Q94D, Q94E, Q94K, Q94N, Q94R, Q94S, Q94T, Q94C, L98I, L98V, L98H, L98A, L98D, L98E, L98K, L98N, L98Q, L98R, L98S, L98T, L98C, L102I, L102V, L102T, L102Q, L102H, L102A, E103N, E103Q, E103H, E104N, E104Q, E104H, L106I, L106V, L106T, L106Q, L106H, L106A, E107N, E107Q, E107H, E109N, E109H, E109Q, F111I, F111V, L116V, L116I, L116T, L116Q, L116H, L116A. L116V, L116I, L116T, L116Q, L116H, L116A, Y125H, Y125I, Y126H, Y126I, L130V, L130I, L130T, L130Q, L130H, L130A, Y132H, Y132I, L133I, L133V, L133T, L133Q, L133H, L133A, E137N, E137Q, E137H, Y138H, Y138I, E149Q, E149H, E149N, L151I, L151V, L151T, L151Q, L151H, L151A, F154I, F154V, F156I, F156V, L160I, L160V, L160T, L160Q, L160H, L160A, Y163H, Y163I, L164I, L164V, L164T, L164Q, L164H, and L164A.

[0075] In another example, a method of increasing protein stability involves the step of introducing one or more amino acid modification that add charged residues to regions of helices A and C such that the polypeptide exhibits increased conformational stability, where the amino acid modifications are chosen from any one or more of L5E, L5D, L5K, L5R, F8E, F8D, F8K, F8R, L9E, L9D, L9K, L9R, S12E, S12D, S12K, S12R, F15E, F15D, F15K, F15R, Q16E, Q16D, Q16K, Q16R, L20E, L20D, L20K, L20R, W22E, W22D, W22K, W22R, Q23E, Q23D, Q23K, Q23R, L24E, L24D, L24K, L24R, G78E, G78D, G78K, G78R, W79E, W79D, W79K, W79R, N80E, N80D, N80K, N80R, T82E, T82D, T82K, T82R, I83E, I83D, I83K, I83R, N86E, N86D, N86K, N86R, L87E, L87D, L87K, L87R, A89E, A89D, A89K, and A89R of a mature IFN-β polypeptide set forth in SEQ ID NO:1.

[0076] In an additional example, a method of increasing protein stability involves the step of introducing one or more amino acid modifications that increase polar interactions between helices A and C, such that the polypeptide exhibits increased conformational stability, where the amino acid modifications are chosen from any one or more or M1E, M1D, M1K, M1R, M1N, M1Q, M1S, M1T, L5E, L5D, L5K, L5R, L5N, L5Q, L5S, L5T, L6E, L6D, L6K, L6R, L6N, L6Q, L6S, L6T, L9E, L9D, L9K, L9R, L9N, L9Q, L9S, L9T, Q10E, Q10D, Q10K, Q10R, Q10N, Q10S, Q10T, S13E, S13D, S13K, S13R, S13N, S13Q, S13T, N14E, N14D, N14K, N14R, N14Q, N14S, N14T, Q16E, Q16D, Q16K, Q16R, Q16N, Q16S, Q16T, C17E, C17D, C17K, C17R, C17N, C17Q, C17S, C17T, L20E, L20D, L20K, L20R, L20N, L20Q, L20S, L20T, I83E, I83D, I83K, I83R, I83N, I83Q, I83S, I83T, N86E, N86D, N86K, N86R, N86Q, N86S, N86T, L87E, L87D, L87K, L87R, L87N, L87Q, L87S, L87T, N90E, N90D, N90K, N90R, N90Q, N90S, N90T, V91E, V91D, V91K, V91R, V91N, V91Q, V91S, V91T, Q94E, Q94D, Q94K, Q94R, Q94N, Q94S, Q94T, I95E, I95D, I95K, I95R, I95N, I95Q, I95S, I95T, H97E, H97D, H97K, H97R, H97N, H97Q, H97S, H97T, L98E, L98D, L98K, L98R, L98N, L98Q, L98S, L98T, V101E, V101D, V101K, V101R, V101N, V101Q, V101S, and V101T.

[0077] In a further example, a method of increasing protein stability involves the step of introducing one or more amino acid modifications that create disulfide bridges in the polypeptide, such that the polypeptide exhibits increased conformational stability, where the amino acid modifications are chosen from any one or more of M1C, L6C, Q10C, S13C, Q16C, N90C, V91C, Q94C, H97C, L98C, and V101C of a mature IFN-β polypeptide set forth in SEQ ID NO:1. Such disulfide bridges formed are at any two or more of positions C1, C6, C10, C13, C16, C90, C91, C94, C97, C98, C101, and C17, such as but not limited to disulfide bridges formed between C1-C101, C6-C98, C6-C90, C10-C97, C10-C98, C13-C94, C17-C90, and C17-C91.

[0078] As another example, a method of increasing protein stability involves the step of introducing one or more amino acid modifications that increase the isoelectric point such that the polypeptide exhibits increased conformational stability, where the amino acid modifications are chosen from any one or more of E43K, E53R, D54K, E61K, E81K, E85K, E103K, E104R, E107R, E109R, and DI 10K of a mature IFN-β polypeptide set forth in SEQ ID NO:1. In some cases, a method also can include increasing protein stability involving the step of introducing one or more amino acid modifications that decrease the isoelectric point such that the polypeptide exhibits increased conformational stability, where the amino acid modifications are chosen from any one or more of R11Q, K45Q, K52Q, K105Q, K108Q, R113Q, K115Q, R124Q, R152Q, R165Q, R11D, K45D, K52D, K105D, K108D, R113E, K115D, R124D, R124E, R152D, and R165D of a mature IFN-β polypeptide set forth in SEQ ID NO:1.

[0079] Also provided herein are any of the above methods for increasing protein stability of an IFN-β polypeptide, where the method also includes a further step of increasing protein stability of the polypeptide by introducing one or more additional amino acid modification into the polypeptide that contributes to one or more of glycosylation or PEGylation.

### DETAILED DESCRIPTION

[0080] Outline

[0081] A. Definitions

[0082] B. Interferon-beta (IFN-β)
[0083] 1. IFN-β Polypeptide and Expression Thereof
[0084] 2. IFN-β Structure
[0085] 3. IFN-β Function
[0086] 4. IFN-β as a Biopharmaceutical

[0087] C. Modified IFN-β and Methods of Modification
[0088] 1. Non-Restricted Rational Mutagenesis One-Dimensional (1D) Scanning
[0089] 2. Two-Dimensional (2D) Scanning
   [0090] a. Identifying in-silico HITs
   [0091] b. Identifying Replacing Amino Acids
   [0092] c. Construction of Modified Proteins and Biological Assays
[0093] 3. Three-Dimensional (3D) Scanning
   [0094] a. Homology
   [0095] b. 3D-Scanning (Structural Homology) Methods
[0096] 4. Super-LEADs and Additive Directional Mutagenesis (ADM)
[0097] 5. Multi-Overlapped Primer Extensions

[0098] D. Modified IFN-β Polypeptides Exhibiting Increased Protein Stability
[0099] 1. Protease Resistance
   [0100] a. Serine Proteases
   [0101] b. Matrix Metalloproteinases
   [0102] c. Generation of IFN-β variants by removal of proteolytic sites
   [0103] d. Modified IFN-β Polypeptides Exhibiting Increased Protease Resistance
      [0104] i. Modified IFN-β Polypeptides Exhibiting Increased Protease Resistance to Gelatinase B
[0105] 2. Conformational Stability
   [0106] a. Addition of charged residues to hydrophobic areas
   [0107] b. Increasing polar interactions between helices A and C
   [0108] c. Creation of disulfide bridges
   [0109] d. Modification of the Isoelectric Point (pI)
      [0110] i. Increasing Isoelectric Point (pI)
      [0111] ii. Decreasing Isoelectric Point (pI)
[0112] 3. SuperLEADS
[0113] 4. Additional Modifications
   [0114] a. Immunogenicity
   [0115] b. Glycosylation
   [0116] c. Other Modifications

[0117] E. Production of IFN-β Polypeptides
[0118] 1. Polypeptide Expression
   [0119] a. Prokaryotes
   [0120] b. Yeast
   [0121] c. Insects and Insect Cells
   [0122] d. Mammalian Cells
   [0123] e. Plants
[0124] 2. Purification
[0125] 3. Fusion Proteins
[0126] 4. Polypeptide Modification
[0127] 5. Nucleotide Sequences

[0128] F. Assessing modified IFN-β polypeptide activity(ies)
[0129] 1. Anti-viral assays
[0130] 2. Anti-proliferative assays
[0131] 3. Natural Killer Cell Activation
[0132] 4. Measuring markers of IFN-β activity
[0133] 5. Non-human animal models

[0134] G. Formulation/Packaging/Administration
[0135] 1 Administration of modified IFN-β polypeptides
   [0136] a. Oral administration
[0137] 2. Administration of nucleic acids encoding modified IFN-β polypeptides (gene therapy)

[0138] H. Therapeutic Uses
[0139] 1. Autoimmune diseases
   [0140] a. Multiple sclerosis (MS)
   [0141] b. Rheumatoid arthritis (RA)
[0142] 2. Inflammatory diseases and disorders
   [0143] a. Inflammatory bowel diseases (IBD)
      [0144] i. Ulcerative colitis
      [0145] ii. Crohn's disease
   [0146] b. Asthma
   [0147] c. Guillain-Barre Syndrome
[0148] 3. Proliferative disorders
   [0149] a. Cancer
   [0150] b. Bone homeostasis
[0151] 4. Viral infections

[0152] I. Combination Therapies

[0153] J. Articles of Manufacture and Kits

[0154] K. EXAMPLES

### A. DEFINITIONS

[0155] Unless defined otherwise, all technical and scientific terms used herein have the same meaning as is commonly understood by one of skill in the art to which the invention(s) belong. All patents, patent applications, published applications and publications, Genbank sequences, websites and other published materials referred to throughout the entire disclosure herein, unless noted otherwise, are incorporated by reference in their entirety. In the event that there is a plurality of definitions for terms herein, those in this section prevail. Where reference is made to a URL or other such identifier or address, it understood that such identifiers can change and particular information on the internet or similar source can come and go, but equivalent information can be found by searching the internet. Reference thereto evidences the availability and public dissemination of such information.

[0156] As used herein, an “interferon-β” polypeptide (also referred to herein as interferon-β or IFN-β) refers to any interferon-β polypeptide, including but not limited to, recombinantly produced polypeptide, synthetically produced polypeptide and IFN-β extracted from cells and tissues including, but not limited to, pituitary and placental tissues, and fibroblasts. IFN-β includes related polypeptides from different species including, but not limited to, animals of human and non-human origin. Human IFN-β (hIFN-β) includes IFN-β, allelic variant isoforms, synthetic molecules from nucleic acids, protein isolated from human tissue and cells, and modified forms of any human IFN-β polypeptides.

[0157] IFN-β polypeptides exhibit allelic variation and species variation. For example, IFN-β also includes IFN-β from any species, including human and non-human species. Typically, an allelic or species variant of IFN-β differs from a native or wildtype IFN-β by about or at least 40%, 50%, 60%, 70%, 80%, 90%, 91%, 92%, 93%, 94%, 95%, 96%, 97%, 98%, or 99%. Interferon-β polypeptides of non-human origin include, but are not limited to, bovine, ovine, porcine, rat, rabbit, horse, other primates such as chimpanzees and macaques, pig, dog, mice and avian IFN-β polypeptides. Exemplary IFN-β polypeptides of non-human origin are those having amino acid sequences (including signal sequences) such as primates, for example, chimpanzees (Pan troglodytes, SEQ ID NO: 527) and macaques (Macaca fascicularis, SEQ ID NO: 528); pig (Sus scrofa, SEQ ID NO:529); dog (Canis familiaris, SEQ ID NO: 530); horse (Equus caballus, SEQ ID NO: 531); bovine (Bos Taurus, SEQ ID NO: 532); and mice (Mus musculus, SEQ ID NO: 533).

[0158] IFN-β also includes synthetic molecules produced from nucleic acid molecules, protein isolated from human and non-human tissue and cells, and modified forms thereof. Human and non-human IFN-β also includes fragments or portions of IFN-β that are of sufficient length or include appropriate regions to retain at least one activity of a full-length mature polypeptide.

[0159] As used herein, a “portion or fragment of an IFN-β polypeptide” refers to any portion of a human or non-human IFN-β polypeptide that exhibits one or more activities of the full-length polypeptide. Such activities include, for example, anti-viral or anti-proliferative activities. Activity can be any level of percentage of activity of the polypeptide including but not limited to, 1% of the activity, 2%, 3%, 4%, 5%, 10%, 20%, 30%, 40%, 50%, 60%, 70%, 80%, 90%, 95%, or more of functional activity to the full-length polypeptide.

[0160] As used herein, IFN-β-1a refers to an IFN-β polypeptide that is produced in CHO cells into which cDNA encoding IFN-β has been introduced. INF-β-1a is 166 amino acids in length and is identical to mature, native fibroblast-derived human IFN-β, including glycosylation at the asparagine residue on position 80. The amino acid sequence of IFN-β-1a is provided in SEQ ID NO:1. Two commercial forms of IFN-β-1a are AVONEX® (Biogen Inc, CA, USA) and Rebif® (Serono Inc., Geneva, Switzerland). Rebif® IFN-β-1a differs from Avonex® IFN-β-1a in that it is formulated for administration to the skin (i.e., subcutaneously); whereas Avonex® is formulated for intramuscular administration.

[0161] As used herein, IFN-β-1b refers to an IFN-β polypeptide that is produced in E. coli that bears a genetically engineered plasmid encoding human IFN-β. The resulting expressed IFN-β-1b product is not glycosylated, is lacking the amino-terminal methionine (Met1), and the cysteine residue at position 17 is mutated to a serine. IFN-β-1b is 165 amino acids in length and does not include the carbohydrate side chains that are found in natural human IFN-β. A commercial form of IFN-β-1b is BETASERON® (Berlex laboratories, Richmond, Calif., USA). The amino acid sequence of IFN-β-1b is provided in SEQ ID NO: 3.

[0162] As used herein, “native IFN-β” refers to an interferon-β as produced by an organism in nature. For example, humans produce IFN-β. Exemplary native human IFN-β polypeptide sequences are set forth in SEQ ID NOS: 1 and 2. Other animals, such as mammals, produce native IFN-β, for example, hamster, mouse, cow, monkey, orangutan, baboon, chimpanzee, macaque, gibbon and gorilla. Sequences for other mammalian IFN-β polypeptides are set forth in SEQ ID NOS:527-533.

[0163] As used herein, “mature IFN-β” or “mature IFN-β polypeptide” refers to an interferon-β polypeptide that lacks a signal sequence. Typically, a signal sequence is cleaved following secretion of a protein from a cell. Thus, a mature IFN-β polypeptide is typically a secreted protein. For purposes herein, reference to a mature human IFN-β polypeptide is to a native IFN-β polypeptide lacking a signal sequence, such as for example a mature IFN-β polypeptide set forth in SEQ ID NO:1. The amino acid sequence of IFN-β set forth in SEQ ID NO:1 differs from that of the precursor polypeptide set forth in SEQ ID NO:2 in that SEQ ID NO:1 is lacking the signal sequence which includes residues 1-21 of SEQ ID NO:2.

[0164] As used herein, an “interferon-α” polypeptide (also referred to herein as interferon-α or IFN-α) refers to any interferon-α polypeptide, including but not limited to, recombinantly produced polypeptide, synthetically produced polypeptide and IFN-α extracted from cells or tissues including, but not limited to, pituitary and placental tissues. There are at least 13 different IFN-α isoforms. IFN-α also includes related polypeptides from different species including, but not limited to animals of human and non-human origin. Human IFN-α (hIFN-α) includes all isoforms of IFN-α, allelic variant isoforms, synthetic molecules from nucleic acids, protein isolated from human tissue and cells, and modified forms thereof. Exemplary precursor and wild-type mature hIFN-α sequences include IFNα-2 isoforms set forth in SEQ ID NOS: 521-526. Human IFN-α also includes fragments of IFN-α that are of sufficient length to be functionally active.

[0165] As used herein, “unmodified target protein,” “unmodified protein,” “unmodified polypeptide,” “unmodified cytokine,” “unmodified IFN-β,” or “unmodified interferon-β” or grammatical variations thereof refers to a starting protein that is selected for modification using the methods provided herein. The starting target polypeptide can be the naturally-occurring, wild-type form of a polypeptide. In addition, the starting target polypeptide can have been previously altered or mutated, such that it differs from the native wild type isoform but is nonetheless referred to herein as a starting unmodified target protein relative to the subsequently modified proteins produced herein. Thus, existing proteins known in the art that previously have been modified to have a desired change, such as an increase or decrease or other alteration, in a particular biological activity or property compared to an unmodified reference protein can be selected and used as the starting unmodified target protein. For example, a protein that has been modified from its native form by one or more single amino acid changes and possesses either an increase or decrease in a desired property, such as resistance to proteolysis or reduced immunogenicity (see e.g., US-2005-0054052), can be used in the methods provided herein as the starting unmodified target protein for further modification of either the same or a different property. Exemplary modified IFN-β polypeptides known in the art include any IFN-β polypeptide described in, for example, published U.S. Application Nos. US-2004-0132977 and US-2005-0054052; U.S. Pat. Nos. 6,127,332, 6,531,122, and 4,588,585; and published International Application Nos. WO 2006/020580; WO 2004/087753, WO 2004/031352, WO 2005/003157, WO 00/68387, WO 98/48018, WO 98/03887, and EP 260350.

[0166] Existing proteins known in the art that previously have been modified to have a desired alteration, such as an increase or decrease, in a particular biological activity or property compared to an unmodified or reference protein can be selected and used as provided herein for identification of structurally homologous loci on other structurally homologous target proteins. For example, a protein that has been modified by one or more single amino acid changes and possesses either an increase or decrease in a desired property or activity, such as for example resistance to proteolysis, can be utilized with the methods provided herein to identify on structurally homologous target proteins, corresponding structurally homologous loci that can be replaced with suitable replacing amino acids and tested for either an increase or decrease in the desired activity.

[0167] Exemplary unmodified human IFN-β polypeptides include, but are not limited to the mature, wild-type IFN-β polypeptide (SEQ ID NO:1) or the wild-type precursor IFN-β polypeptide having a signal peptide (SEQ ID NO: 2) or a commercially available IFN-β polypeptide that is not glycosylated, does not have the amino-terminal methionine and has a mutation of C17S (SEQ ID NO: 3). One of skill in the art recognizes that the referenced positions of SEQ ID NO:1 differs by one amino acid residue when compared to SEQ ID NO: 3, which is a form of IFN-β lacking the amino-terminal methionine (Met1). Thus, the second amino acid residue of SEQ ID NO:1 “corresponds to” the first amino acid residue of SEQ ID NO: 3

[0168] As used herein, “in a position or positions corresponding to an amino acid position” or “corresponding to any one or more amino acid positions” or “amino acid modifications corresponding to any one or more” of a protein, refers to amino acid positions that are determined to correspond to one another based on sequence and/or structural alignments with a specified reference protein. For example, in a position corresponding to an amino acid position of a mature IFN-β polypeptide can be determined empirically by aligning the sequence of amino acids set forth in a mature IFN-β polypeptide, such as for example a mature IFN-β polypeptide having a sequence of amino acids set forth in SEQ ID NO:1, with a particular interferon-β polypeptide of interest. Corresponding positions can be determined by such alignment by one of skill in the art using manual alignments or by using the numerous alignment programs available (for example, BLASTP). By aligning the sequences of IFN-β polypeptides, one skilled in the art can identify corresponding residues, using conserved and identical amino acid residues as guides. For example, one of skill in the art recognizes that the referenced positions of SEQ ID NO:1 differ by one amino acid residue when compared to SEQ ID NO: 3, which is a form of IFN-β lacking the amino-terminal methionine (Met1). Thus, the second amino acid residue of SEQ ID NO:1 “corresponds to” the first amino acid residue of SEQ ID NO: 3. In other instances, corresponding regions can be identified. For example, L6 of SEQ ID NO:1 (mature IFN-β) corresponds to L5 of SEQ ID NO:3 (mature IFN-β lacking the amino-terminal methionine and having a mutation of C17S) or L27 of SEQ ID NO:2 (precursor IFN-β with signal peptide). Further, the position C17 in SEQ ID NO:1 corresponds to position S16 in SEQ ID NO:3. One skilled in the art also can employ conserved amino acid residues as guides to find corresponding amino acid residues between and among human and non-human sequences. For example, amino acid residue 27 of SEQ ID NO: 2 is a leucine which is conserved among human and non-human species. Residue L27 of SEQ ID NO: 2 “corresponds to” residue L27 of SEQ ID NO: 527, residue L27 of SEQ ID NO: 528, residue L27 of SEQ ID NO: 529, residue L38 of SEQ ID NO: 530, residue L27 of SEQ ID NO: 531, residue L27 of SEQ ID NO: 532 and residue L27 of SEQ ID NO: 533. Corresponding positions also can be based on structural alignments, for example by using computer simulated alignments of protein structure. Recitation that amino acids of a polypeptide correspond to amino acids in a disclosed sequence refers to amino acids identified upon alignment of the polypeptide with the disclosed sequence to maximize identity or homology (where conserved amino acids are aligned) using a standard alignment algorithm, such as the GAP algorithm. As used herein, “at a position corresponding to” refers to a position of interest (i.e., base number or residue number) in a nucleic acid molecule or protein relative to the position in another reference nucleic acid molecule or protein. The position of interest to the position in another reference protein can be in, for example, a precursor protein, an allelic variant, a heterologous protein, an amino acid sequence from the same protein of another species, etc. Corresponding positions can be determined by comparing and aligning sequences to maximize the number of matching nucleotides or residues, for example, such that identity between the sequences is greater than 95%, greater than 96%, greater than 97%, greater than 98% or greater than 99%. The position of interest is then given the number assigned in the reference nucleic acid molecule.

[0169] As used herein, a “variant,” “mutant,” “interferon-β variant,” “mutant interferon-β,” or “modified IFN-β” refers to an interferon-β polypeptide (protein) that differs from a wildtype IFN-β, including allelic variants, of a particular species by about or at least 40%, 50%, 60%, 70%, 80%, 90%, 91%, 92%, 93%, 94%, 95%, 96%, 97%, 98%, or 99% in its primary sequence of amino acids. Typically, a modified IFN-β polypeptide has one or more modifications in primary sequence compared to an unmodified interferon-β. For example, the modified polypeptides provided herein having one or more amino acid modification can have any number of modifications, such as 1, 2, 3, 4, 5, 6, 7, 8, 9, 10, 11, 12, 13, 14, 15, 16, 17, 18, 19, 20 or more amino acid replacements, deletions or insertions. The one or more mutations can be one or more amino acid replacements (substitutions), insertions, deletions and any combination thereof. For example, an amino acid replacement can include replacement of F by V at a position corresponding to amino acid position 70 of mature IFN-β polypeptide set forth in SEQ ID NO:1, also denoted as F70V. For purposes herein, a modified IFN-β polypeptide also is called a LEAD or Super-LEAD (as defined herein).

[0170] As used herein, modified IFN-β polypeptides provided herein that exhibit increased protein stability include IFN-β polypeptides modified at any number of residues whereby the targeted activity or property that is modified, such as protease resistance, is modified, and such that at least one activity, typically a therapeutic activity, is retained at a level, so as, for example, to permit formulation of the IFN-β polypeptide at an effective dosage for treatment. In general, the modified IFN-β polypeptides include 1 or 2 modifications, but can include such modifications in addition to modifications that alter other properties. Hence, included are modified IFN-β polypeptides in which a total of 1, 2, 3, 4, 5, 6, 7, 8, 9, 10, 11, 12, 13, 14, 15, 16, 17, 18, 19, 20 or more positions compared to an unmodified IFN-β polypeptide. Modified IFN-β polypeptides include mature forms and precursor forms. Modification for increased protein stability is with reference to the same polypeptide that does not have the particular or corresponding modification. The polypeptide modified can include additional modifications, and modification in that context is with reference to a wildtype human IFN-β polypeptide that includes a sequence of amino acids set forth in SEQ ID NO:1 or SEQ ID NO:3, and also includes modification relative to an allelic or species variants thereof.

[0171] As used herein, an IFN-β polypeptide that has 1, 2, 3, 4, 5, 6, 7, 8, 9, 10, 11, 12, 13, 14, 15, 16, 17, 18, 19 or 20 modifications refers to an IFN-β polypeptide that has the number of amino acid modifications in its primary sequence of amino acids with respect to a wild-type or native IFN-β polypeptide. Such modifications can be, for example, in a human IFN-β polypeptide, such that 1, 2, 3, 4, 5, 6, 7, 8, 9, 10, 11, 12, 13, 14, 15, 16, 17, 18, 19 or 20 modifications in a human IFN-β polypeptide refers to the number of modifications in a wild-type mature human IFN-β polypeptide set forth in SEQ ID NO:1 or allelic variant thereof.

[0172] As used herein, “primary sequence” refers to the linear sequence of amino acids of a polypeptide.

[0173] As used herein, the terms “homology” and “identity” are used interchangeably, but homology for proteins can include conservative amino acid changes. In general to identify corresponding positions the sequences of amino acids are aligned so that the highest order match is obtained (see, e.g.: Computational Molecular Biology, Lesk, A. M., ed., Oxford University Press, New York, 1988; Biocomputing: Informatics and Genome Projects, Smith, D. W., ed., Academic Press, New York, 1993; Computer Analysis of Sequence Data Part I, Griffin, A. M., and Griffin, H. G., eds., Humana Press, New Jersey, 1994; Sequence Analysis in Molecular Biology, von Heinje, G., Academic Press, 1987; and Sequence Analysis Primer, Gribskov, M. and Devereux, J., eds., M Stockton Press, New York, 1991; Carillo et al. (1988) SIAM J Applied Math 48:1073).

[0174] As use herein, “sequence identity” refers to the number of identical amino acids (or nucleotide bases) in a comparison between a test and a reference polypeptide or polynucleotide. Homologous polypeptides refer to a pre-determined number of identical or homologous amino acid residues. Homology includes conservative amino acid substitutions as well identical residues. Sequence identity can be determined by standard alignment algorithm programs used with default gap penalties established by each supplier. Homologous nucleic acid molecules refer to a pre-determined number of identical or homologous nucleotides. Homology includes substitutions that do not change the encoded amino acid (i.e., “silent substitutions”) as well identical residues. Substantially homologous nucleic acid molecules hybridize typically at moderate stringency or at high stringency all along the length of the nucleic acid or along at least about 70%, 80% or 90% of the full-length nucleic acid molecule of interest. Also contemplated are nucleic acid molecules that contain degenerate codons in place of codons in the hybridizing nucleic acid molecule. (For determination of homology of proteins, conservative amino acids can be aligned as well as identical amino acids; in this case, percentage of identity and percentage homology vary). Whether any two nucleic acid molecules have nucleotide sequences (or any two polypeptides have amino acid sequences) that are at least 80%, 85%, 90%, 95%, 96%, 97%, 98% or 99% “identical” can be determined using known computer algorithms such as the “FASTA” program, using for example, the default parameters as in Pearson et al. Proc. Natl. Acad. Sci. USA 85: 2444 (1988) (other programs include the GCG program package (Devereux, J., et al., Nucleic Acids Research 12(I): 387 (1984)), BLASTP, BLASTN, FASTA (Atschul, S. F., et al., J. Molec. Biol. 215:403 (1990); Guide to Huge Computers, Martin J. Bishop, ed., Academic Press, San Diego (1994), and Carillo et al. SIAM J Applied Math 48: 1073 (1988)). For example, the BLAST function of the National Center for Biotechnology Information database can be used to determine identity. Other commercially or publicly available programs include, DNAStar “MegAlign” program (Madison, Wis.) and the University of Wisconsin Genetics Computer Group (UWG) “Gap” program (Madison Wis.)). Percent homology or identity of proteins and/or nucleic acid molecules can be determined, for example, by comparing sequence information using a GAP computer program (e.g., Needleman et al. J. Mol. Biol. 48: 443 (1970), as revised by Smith and Waterman (Adv. Appl. Math. 2: 482 (1981)). Briefly, a GAP program defines similarity as the number of aligned symbols (i.e., nucleotides or amino acids) which are similar, divided by the total number of symbols in the shorter of the two sequences. Default parameters for the GAP program can include: (1) a unary comparison matrix (containing a value of 1 for identities and 0 for non identities) and the weighted comparison matrix of Gribskov et al. Nucl. Acids Res. 14: 6745 (1986), as described by Schwartz and Dayhoff, eds., Atlas of Protein Sequence and Structure, National Biomedical Research Foundation, pp. 353-358 (1979); (2) a penalty of 3.0 for each gap and an additional 0.10 penalty for each symbol in each gap; and (3) no penalty for end gaps.

[0175] Therefore, as used herein, the term “identity” represents a comparison between a test and a reference polypeptide or polynucleotide. In one non-limiting example, “at least 90% identical to” refers to percent identities from 90 to 100% relative to the reference polypeptides. Identity at a level of 90% or more is indicative of the fact that, assuming for exemplification purposes a test and reference polynucleotide length of 100 amino acids are compared, no more than 10% (i.e., 10 out of 100) of amino acids in the test polypeptide differs from that of the reference polypeptides. Similar comparisons can be made between a test and reference polynucleotides. Such differences can be represented as point mutations randomly distributed over the entire length of an amino acid sequence or they can be clustered in one or more locations of varying length up to the maximum allowable, e.g., 10/100 amino acid difference (approximately 90% identity). Differences are defined as nucleic acid or amino acid substitutions, insertions or deletions. At the level of homologies or identities above about 85-90%, the result should be independent of the program and gap parameters set; such high levels of identity can be assessed readily, often without relying on software.

[0176] As used herein, it also is understood that the terms “substantially identical” or “similar” varies with the context as understood by those skilled in the relevant art.

[0177] As used herein, “a directed evolution method” refers to methods that “adapt” either proteins, including natural proteins, synthetic proteins or protein domains to have changed properties, such as the ability to act in different or existing natural or artificial chemical or biological environments and/or to elicit new functions and/or to increase or decrease a given activity, and/or to modulate a given feature. Exemplary directed evolution methods include, among others, rational directed evolution methods described in U.S. application Ser. Nos. 10/022,249; and U.S. Published Application No. US-2004-0132977-A1.

[0178] As used herein, “two dimensional rational mutagenesis scanning (2-D scanning)” refers to the processes provided herein in which two dimensions of a particular protein sequence are scanned: (1) one dimension is to identify specific amino acid residues along the protein sequence to replace with different amino acids, referred to as is-HIT target positions, and (2) the second dimension is the amino acid type selected for replacing the particular is-HIT target, referred to as the replacing amino acid.

[0179] As used herein, a “property” of an IFN-β polypeptide refers to any property of an IFN-β polypeptide. Such properties include, but are not limited to, protein stability, resistance to proteolysis, conformational stability, thermal tolerance, and tolerance to pH conditions. Changes in properties can alter an “activity” of the polypeptide.

[0180] As used herein, “protein stability” refers to increased protein-half-life under one or more conditions including, but not limited to, exposure to proteases, increased temperature, particular pH conditions and/or exposure to denaturing ingredients. Increased protein stability exhibited by an IFN-β polypeptide can be manifested as increased protease resistance, or increased conformational stability such as increased tolerance to temperature, pH, or tolerance to other denaturing ingredients. Increased protein stability can result in an increase in serum half-life and/or other pharmacokinetic properties in vivo. A modified polypeptide that exhibits increased protein stability in vitro or in vivo is, for example, 1%, 2%, 3%, 4%, 5%, 6%, 7%, 8%, 9%, 10%, . . . 20%, . . . 30%, . . . 40%, . . . 50%, . . . 60%, . . . , 70%, . . . 80%, . . . 90%, 91%, 92%, 93%, 94%, 95%, 96%, 97%, 98%, 99%, 100%, 150%, 200%, 300%, 400%, 500%, 1000% or more stable than an unmodified polypeptide, or a modified polypeptide that exhibits increased protein stability in vitro or in vivo, for example, has an increased half-life increased by an amount that is at least 6 times, 7 times, 8 times, 9 times, 10 times, 20 times, 30 times, 40 times, 50 times, 60 times, 70 times, 80 times, 90 times, 100 times, 200 times, 300 times, 400 times, 500 times, 600 times, 700 times, 800 times, 900 times, 1000 times, or more times when compared to the half-life of the unmodified IFN-β polypeptide.

[0181] The protein stability of a polypeptide can be assessed in vitro or in vivo by any method known to those of skill. For example, it can be assessed in assays that measure protease resistance or conformational stability (i.e. resistance to temperature). Such assays detect change of a predetermined activity, typically over time and/or during exposure to destabilizing conditions. Exemplary assays are provided herein. For example, the resistance of the modified IFN-β polypeptides compared to wild-type IFN-β against enzymatic cleavage by proteases (e.g., α-chymotrypsin, carboxypeptidase, endoproteinase Arg-C, endoproteinase Asp-N, endoproteinase Glu-C, endoproteinase Lys-C, and trypsin) can be empirically tested by treating the polypeptides with proteases over time and then testing the polypeptides for residual functional activity such as for example, anti-viral or anti-proliferative activities.

[0182] As used herein, “resistance to proteolysis” refers to any amount of decreased cleavage of polypeptide by a proteolytic agent, such as a protease. This can be achieved by modifying particular amino acid residues that are susceptible to cleavage by a particular protease to render them less susceptible to cleavage compared to cleavage by the same protease under the same conditions. A modified polypeptide that exhibits increased resistance to proteolysis exhibits, for example, 1%, 2%, 3%, 4%, 5%, 6%, 7%, 8%, 9%, 10%, . . . 20%, . . . 30%, . . . 40%, . . . 50%, . . . 60%, . . . , 70%, . . . 80%, . . . 90%, 91%, 92%, 93%, 94%, 95%, 96%, 97%, 98%, 99%, 100%, 200%, 300%, 400%, 500%, or more resistance to proteolysis than an unmodified polypeptide.

[0183] As used herein, “conformational stability” refers to any amount of increased tolerance of a polypeptide to denaturation. This an be achieved by modifying particular amino acid residues that are susceptible to denaturation conditions to render them less susceptible to denaturation under the same conditions. Conformational stability can be determined by assessing the resistance or susceptibility of a polypeptide to denaturation conditions, such as resistance to temperature or pH. A modified polypeptide that exhibits increased conformational stability exhibits, for example, 1%, 2%, 3%, 4%, 5%, 6%, 7%, 8%, 9%, 10%, . . . 20%, . . . 30%, . . . 40%, . . . 50%, . . . 60%, . . . , 70%, . . . 80%, . . . 90%, 91%, 92%, 93%, 94%, 95%, 96%, 97%, 98%, 99%, 100%, 200%, 300%, 400%, 500% or more resistance to denaturation than an unmodified polypeptide. As used herein, “denaturation” refers to any noncovalent change in the structure of a protein. This change can alter the secondary, tertiary, or quaternary structure of the polypeptide molecule. Denaturation of a polypeptide can occur by, for example but not limited to, exposure to chaotropic agents such as urea and guanidine hydrochloride, detergents, temperature, pH, and reagents which cleave disulfide bridges such as dithiothreitol or dithioerythritol.

[0184] As used herein, “thermal tolerance” refers to any amount of decreased denaturation of a polypeptide after exposure to altered temperatures. A modified polypeptide that exhibits increased thermal tolerance exhibits, for example, 1%, 2%, 3%, 4%, 5%, 6%, 7%, 8%, 9%, 10%, . . . 20%, . . . 30%, . . . 40%, . . . 50%, . . . 60%, . . . , 70%, . . . 80%, . . . 90%, 91%, 92%, 93%, 94%, 95%, 96%, 97%, 98%, 99%, 100%, 200%, 300%, 400%, 500% or more stability at varied temperatures than an unmodified polypeptide. For example, a modified polypeptide can exhibit increased thermal tolerance in vivo when administered to a subject than an unmodified polypeptide.

[0185] As used herein, “proteases,” “proteinases” or “peptidases” are interchangeably used to refer to enzymes that catalyze the hydrolysis of covalent peptidic bonds. Proteases include, for example, serine proteases and matrix metalloproteinases. Serine protease or serine endopeptidases constitute a class of peptidases, which are characterized by the presence of a serine residue in the active center of the enzyme. Serine proteases participate in a wide range of functions in the body, including blood clotting, inflammation as well as digestive enzymes in both prokaryotes and eukaryotes. The mechanism of cleavage by “serine proteases,” is based on nucleophilic attack of a targeted peptidic bond by a serine. Cysteine, threonine or water molecules associated with aspartate or metals also can play this role. Aligned side chains of serine, histidine and aspartate form a catalytic triad common to most serine proteases. The active site of serine proteases is shaped as a cleft where the polypeptide substrate binds. Amino acid residues are labeled from N to C termini of a polypeptide substrate (Pi, . . . , P3, P2, P1, P1′, P2′, P3′, . . . , Pj). The respective binding sub-sites are labeled (Si, . . . , S3, S2, S1, S1′, S2′, S3′, . . . , Sj). The cleavage is catalyzed between P1 and P1′.

[0186] As used herein, a matrix metalloproteinases (MMP) refers to any of a family of metal-dependent, such as Zn⁺²-dependent, endopeptidases that degrade components of the extracellular matrix (ECM). MMPs include four classes: collagenases, stromelysin, membrane-type metalloproteinases and gelatinases. Proteolytic activities of MMPs and plasminogen activators, and their inhibitors, are important for maintaining the integrity of the ECM. Cell-ECM interactions influence and mediate a wide range of processes including proliferation, differentiation, adhesion and migration of a variety of cell types. MMPs also process a number of cell-surface cytokines, receptors and other soluble proteins and are involved in tissue remodeling processes such as wound healing, pregnancy and angiogenesis. Under physiological conditions in vivo, MMPs are synthesized as inactive precursors (zymogens) and are cleaved to produce an active form. Additionally, the enzymes are specifically regulated by endogenous inhibitors called tissue inhibitors of matrix metalloproteinases (TIMPs).

[0187] As used herein, a “functional activity” or “activity” of an interferon-β polypeptide refers to any activity exhibited by an interferon-β polypeptide that can be assessed. Such activities can be tested in vitro and/or in vivo and include, but are not limited to, cell proliferation and/or differentiation activity, anti-inflammatory activity, anti-proliferative activity, anti-viral activity, morphogenetic activity, cellular activations such as activation of NK cells, therapeutic activity, tumor suppressor activity, ontogenetic activity, oncogenetic activity, enzymatic activity, pharmacological activity, cell/tissue tropism and delivery, or induction of IFN-β induced protein or proteins. Activity can be assessed, for example, by measuring cell proliferation in vitro, measuring anti-viral activity in vitro or in vivo, or measuring binding to an interferon-β receptor. The results of such assays correlate with an in vivo activity and hence a biological activity. Assays to determine functionality or activity of modified forms of IFN-β are known to those of skill in the art. Exemplary assays to assess the functional activity of an IFN-β polypeptide are described in Example 5.

[0188] As used herein, “retains at least one activity” refers to the activity exhibited by a modified IFN-β polypeptide compared to an unmodified IFN-β polypeptide. Generally, a modified IFN-β polypeptide that retains an activity of an unmodified IFN-β polypeptide either improves or maintains the requisite biological activity (e.g., anti-viral and anti-proliferation activity) of an unmodified IFN-β polypeptide. In some cases, a modified IFN-β polypeptide can retain an activity that is decreased compared to an unmodified IFN-β polypeptide. Activity of a modified polypeptide can be any level of percentage of activity of the unmodified polypeptide, including but not limited to, 1% of the activity, 2%, 3%, 4%, 5%, 10%, 20%, 30%, 40%, 50%, 60%, 70%, 80%, 90%, 100%, 200%, 300%, 400%, 500%, or more of functional activity compared to the unmodified polypeptide.

[0189] As used herein, a recitation that a modified IFN-β polypeptide has more anti-viral activity (or other activity) than anti-proliferative activity (or another activity) compared to the unmodified IFN-β polypeptide is comparing the absolute value of the change in each activity compared to the activity of an unmodified or native form.

[0190] As used herein, “in silico” refers to research and experiments performed using a computer. In silico methods include, but are not limited to, molecular modeling studies and biomolecular docking experiments.

[0191] As used herein, “is-HIT” refers to an in silico identified amino acid position along a target protein sequence that has been identified based on i) the particular protein properties to be evolved, ii) the protein's sequence of amino acids, and/or iii) the known properties of the individual amino acids. These is-HIT loci on the protein sequence are identified without use of experimental biological methods. For example, once the protein feature(s) to be modified is (are) selected, diverse sources of information or previous knowledge (i.e., protein primary, secondary or tertiary structures, literature, patents) are exploited to determine those amino acid positions that are amenable to improved protein fitness by replacement with a different amino acid. This step utilizes protein analysis “in silico.” All possible candidate amino acid positions along a target protein's primary sequence that might be involved in the feature being evolved are referred to herein as “in silico HITs” (“is-HITs”). The collection (library), of all is-HITs identified during this step represents the first dimension (target residue position) of the two-dimensional scanning methods provided herein.

[0192] As used herein, “amenable to providing the evolved predetermined property or activity” in the context of identifying is-HITs refers to an amino acid position on a protein that is contemplated, based on in silico analysis, to possess properties or features that when replaced result in the desired property being evolved. The phrase “amenable to providing the evolved predetermined property or activity” in the context of identifying replacement amino acids refers to a particular amino acid type that is contemplated, based on in silico analysis, to possess properties or features that when used to replace the original amino acid in the unmodified starting protein result in the desired property being evolved.

[0193] As used herein, “high-throughput screening” (HTS) refers to processes that test a large number of samples, such as samples of test proteins or cells containing nucleic acids encoding the proteins of interest to identify structures of interest or to identify test compounds that interact with the variant proteins or cells containing them. HTS operations are amenable to automation and are typically computerized to handle sample preparation, assay procedures and the subsequent processing of large volumes of data.

[0194] As used herein, the term “restricted,” when used in the context of the identification of is-HIT amino acid positions along the protein sequence selected for amino acid replacement and/or the identification of replacing amino acids, means that fewer than all amino acids on the protein-backbone are selected for amino acid replacement and/or fewer than all of the remaining 19 amino acids available to replace the original amino acid present in the unmodified starting protein are selected for replacement. In particular embodiments of the methods provided herein, the is-HIT amino acid positions are restricted such that fewer than all amino acids on the protein-backbone are selected for amino acid replacement. In other embodiments, the replacing amino acids are restricted such that fewer than all of the remaining 19 amino acids available to replace the native amino acid present in the unmodified starting protein are selected as replacing amino acids. In an exemplary embodiment, both of the scans to identify is-HIT amino acid positions and the replacing amino acids are restricted such that fewer than all amino acids on the protein-backbone are selected for amino acid replacement and fewer than all of the remaining 19 amino acids available to replace the native amino acid are selected for replacement.

[0195] As used herein, “candidate LEADs” are modified (mutant) proteins that are contemplated as potentially having an alteration in any attribute, chemical, physical or biological property in which such alteration is sought. In the methods herein, candidate LEADs are generally generated by systematically replacing is-HITS loci in a protein or a domain thereof with typically a restricted subset, or all, of the remaining 19 amino acids, such as obtained using PAM analysis. Candidate LEADs can be generated by other methods known to those of skill in the art tested by the high throughput methods herein. Typically, a candidate lead contains one mutation at one is-HIT position. For purposes herein, a candidate LEAD is generated by modification or replacement of is-HITs in an unmodified IFN-β protein. Reference to exemplary amino acid modifications is to amino acid modifications corresponding to any one or more amino acid positions of a mature IFN-β polypeptide. As discussed herein above, one of skill in the art could determine “corresponding amino acid positions” in unmodified forms of IFN-β used to generate a candidate LEAD compared to a mature IFN-β polypeptide, such as for example a mature IFN-β polypeptide having a sequence of amino acids set forth in SEQ ID NO:1. For example, one of skill in the art recognizes that the referenced positions of SEQ ID NO:1 differ by one amino acid residue when compared to SEQ ID NO: 3, which is a form of IFN-β lacking the amino-terminal methionine (Met1). Thus, the second amino acid residue of SEQ ID NO:1 “corresponds to” the first amino acid residue of SEQ ID NO: 3.

[0196] As used herein, “LEADs” are “candidate LEADs” whose activity has been demonstrated to be modified or improved for the particular attribute, chemical, physical or property or activity. For purposes herein a “LEAD” typically has activity or exhibits a property with respect to the activity or property of interest that differs by at least about or at least 1%, 5%, 10%, 20%, 30%, 40%, 50%, 60%, 70%, 80%, 90%, 100%, 150%, 200%, 300%, 400%, 500% or more from the unmodified and/or wild type (native) protein. In certain embodiments, the change in activity is at least about 5%, 10%, 15%, 20%, 25%, 30%, 35%, 40%, 45%, 50%, 55%, 60%, 65%, 70%, 75%, 80%, 85%, 90%, 95% or 100%, of the activity of the unmodified target protein. In other embodiments, the change in activity is not more than about 5%, 10%, 15%, 20%, 25%, 30%, 35%, 40%, 45%, 50%, 55%, 60%, 65%, 70%, 75%, 80%, 85%, 90%, 95% or 100% of the activity of the unmodified target protein. In yet other embodiments, the change in activity is at least about 2 times, 3 times, 4 times, 5 times, 6 times, 7 times, 8 times, 9 times, 10 times, 20 times, 30 times, 40 times, 50 times, 60 times, 70 times, 80 times, 90 times, 100 times, 200 times, 300 times, 400 times, 500 times, 600 times, 700 times, 800 times, 900 times, 1000 times, or more times greater than the activity of the unmodified target protein. The desired alteration, which can be either an increase or a reduction in activity, depends upon the function or property of interest (e.g., ˜10%, ˜20%, etc.). The LEADs can be further modified by replacement of a plurality (2 or more) of “is-HIT” target positions on the same protein molecule to generate “super-LEADs.”

[0197] As used herein, the term “superLEAD” refers to modified polypeptides (or mutant proteins; variants) obtained by combining the single mutations present in two or more of the LEAD molecules in a single polypeptide molecule. Accordingly, in the context of the modified proteins provided herein, the phrase “polypeptides containing or having two or more single amino acid replacements” or “polypeptides containing any one or more modifications” encompasses any combination of two or more of the mutations described herein for a respective protein. For example, the modified polypeptides provided herein having two or more single amino acid replacements can have any combination of 2, 3, 4, 5, 6, 7, 8, 9, 10, 11, 12, 13, 14, 15, 16, 17, 18, 19, 20 or more of the amino acid replacements at the disclosed replacement positions. The collection of super-LEAD mutant molecules is generated, tested and phenotypically characterized one-by-one in addressable arrays. Super-LEAD mutant molecules are molecules containing a variable number and type of LEAD mutation. Those molecules displaying further improved fitness for the particular feature being evolved, are referred to as super-LEADs. Super-LEADs can be generated by other methods known to those of skill in the art and tested by the high throughput methods herein. For purposes herein, a super-LEAD typically has activity with respect to the function of interest that differs from the improved activity of a LEAD by a desired amount, such as at least 10%, 20%, 30%, 40%, 50%, 60%, 70%, 80%, 90%, 100%, 150%, 200%, 300%, 400%, 500% or more from at least one of the LEAD mutants from which it is derived. As with LEADs, the change in the activity for super-LEADs is dependent upon the activity that is being “evolved.” The desired alteration, which can be either an increase or a reduction in activity, depends upon the function or property of interest.

[0198] As used herein, the phrase “altered loci” refers to the is-HIT amino acid positions in the LEADs or super-LEADs that are replaced with different replacing amino acids resulting in the desired altered property.

[0199] As used herein, an “exposed residue” presents more than 15% of its surface exposed to the solvent.

[0200] As used herein, the phrase “structural homology” refers to the degree of coincidence in space between two or more protein backbones. Protein backbones that adopt the same protein structure, fold and show similarity upon three-dimensional structural superposition in space can be considered structurally homologous. Structural homology is not based on sequence homology, but rather on three-dimensional homology. Two amino acids in two different proteins that are homologous based on structural homology between those proteins do not necessarily need to be in sequence-based homologous regions. For example, protein backbones that have a root mean squared (RMS) deviation of less than 3.5, 3.0, 2.5, 2.0, 1.7 or 1.5 angstroms (Å) at a given space position or defined region between each other can be considered to be structurally homologous in that region and are referred to herein as having a “high coincidence” between their backbones. It is contemplated herein that substantially equivalent (e.g., “structurally related”) amino acid positions that are located on two or more different protein sequences that share a certain degree of structural homology have comparable functional tasks; also referred to herein as “structurally homologous loci.” These two amino acids then can be “structurally similar” or “structurally related” with each other, even if their precise primary linear positions on the sequences of amino acids, when these sequences are aligned, do not match with each other. Amino acids that are “structurally related” can be far away from each other in the primary protein sequences, when these sequences are aligned following the rules of classical sequence homology. As used herein, a “structural homolog” is a protein that is generated by structural homology.

[0201] As used herein, a “single amino acid replacement” refers to the replacement of one amino acid by another amino acid. The replacement can be by a natural amino acid or non-natural amino acids. When one amino acid is replaced by another amino acid in a protein, the total number of amino acids in the protein is unchanged.

[0202] As used herein, the phrase “only one amino acid replacement occurs on each target protein” refers to the modification of a target protein, such that it differs from the unmodified form of the target protein by a single amino acid change. For example, in one embodiment, mutagenesis is performed by the replacement of a single amino acid residue at only one is-HIT target position on the protein backbone (e.g., “one-by-one” in addressable arrays), such that each individual mutant generated is the single product of each single mutagenesis reaction. The single amino acid replacement mutagenesis reactions are repeated for each of the replacing amino acids selected at each of the is-HIT target positions. Thus, a plurality of mutant protein molecules are produced, whereby each mutant protein contains a single amino acid replacement at only one of the is-HIT target positions.

[0203] As used herein, the phrase “pseudo-wild type,” in the context of single or multiple amino acid replacements, are those amino acids that, while different from the original (e.g., such as native) amino acid at a given amino acid position, can replace the native one at that position without introducing any measurable change in a particular protein activity. A population (library) of sets of nucleic acid molecules encoding a collection of mutant molecules is generated and phenotypically characterized such that proteins with sequences of amino acids different from the original amino acid, but that still elicit substantially the same level (i.e., at least 10%, 50%, 70%, 90%, 95%, 100%, 200%, 300%, 400%, or 500%, depending upon the protein) and type of desired activity as the original protein are selected.

[0204] As used herein, “corresponding structurally-related positions on two or more proteins,” such as IFN-β protein and other cytokines, refer to those amino acid positions determined based upon structural homology to maximize tri-dimensional overlapping between proteins.

[0205] As used herein, the phrase “sequence-related proteins” refers to proteins that have at least 50%, at least 60%, at least 70%, at least 80%, at least 90%, or at least 95% amino acid sequence identity or homology with each other.

[0206] As used herein, families of non-related proteins or “sequence-non-related proteins” refer to proteins having less than 50%, less than 40%, less than 30%, less than 20% amino acid identity or homology with each other.

[0207] As used herein, a composition, such as a pharmaceutical composition “consisting of a modified IFN-β polypeptide” or “consisting essentially of a modified IFN-β polypeptide” means that that composition includes a pharmaceutically acceptable carrier or vehicle and no other active ingredients, particularly any added protease inhibitors. Compositions can contain some endogenous protease inhibitors or other agent in the vehicle, but compositions that consist of or consist essentially of a modified IFN-β polypeptide do not include any added agents, such as added protease inhibitors.

[0208] As used herein, “IFN-β-mediated disease or disorder” refers to any disease or disorder in which treatment with IFN-β ameliorates any symptom or manifestation of the disease or disorder. Exemplary IFN-β-mediated diseases and disorders include, but are not limited to, proliferative disorders and inflammatory disorders, such as cancers, including uveal melanoma, colon cancer, liver cancer and metastasis thereof, asthma, inflammatory bowel diseases such as Crohn's disease and ulcerative colitis, Guillain-Barre syndrome, autoimmune diseases such as multiple sclerosis and rheumatoid arthritis, bone disruption diseases such as osteoporosis, and viral infections such as chronic viral hepatitis and myocardial viral infection.

[0209] As used herein, a disease or condition responsive to administration of or treatment with IFN-β refers to any disease or condition in which any symptom or manisfestation of the disease or disorder is amelieorated or alleviated following administration of IFN-β.

[0210] As used herein, inflammatory bowel diseases refer to chronic disorders of the gastrointestinal tract, especially Crohn's disease or an ulcerative form of colitis, characterized by inflammation of the intestine and resulting in abdominal cramping and persistent diarrhea. Inflammatory bowel diseases are any of several incurable and debilitating diseases of the gastrointestinal tract characterized by inflammation and obstruction of parts of the intestine. Inflammatory bowel disease (IBD) is a group of inflammatory conditions of the large intestine and, in some cases, the small intestine. Principal forms of IBD include: Crohn's disease and ulcerative colitis (UC). A difference between the two is the location and nature of the inflammatory changes in the gut. Crohn's can affect any part of the gastrointestinal tract, from mouth to anus (skip lesions), although a majority of cases start in the terminal ileum. Ulcerative colitis is restricted to the colon and spares the anus. Microscopically, ulcerative colitis is restricted to the mucosa (epithelial lining of the gut), while Crohn's disease affects the whole bowel wall. Crohn's disease and UC present with extra-intestinal manifestations (such as liver problems, arthritis, skin manifestations and eye problems) in different proportions.

[0211] As used herein, asthma refers to chronic respiratory disease, often arising from allergies, that is characterized by sudden recurring attacks of labored breathing, chest constriction, and coughing. A chronic inflammatory respiratory disease is characterized by periodic attacks of wheezing, shortness of breath, and a tight feeling in the chest. A cough producing sticky mucus is symptomatic. The symptoms often appear to be caused by the body's reaction to a trigger such as an allergen (commonly pollen, house dust, animal dander), certain drugs, an irritant (such as cigarette smoke or workplace chemicals), exercise, or emotional stress. These triggers can cause the asthmatic's lungs to release chemicals that create inflammation of the bronchial lining, constriction, and bronchial spasms. If the effect on the bronchi becomes severe enough to impede exhalation, carbon dioxide can build up in the lungs and lead to unconsciousness and death.

[0212] As used herein, Guillain-Barre syndrome refers to a temporary inflammation of the nerves, causing pain, weakness, and paralysis in the extremities and often progressing to the chest and face. It typically occurs after recovery from a viral infection or, in rare cases, following immunization for influenza. Guillain-Barre Syndrome is a disease of the nervous system due to damage to the myelin sheath around nerves.

[0213] As used herein, viral hepatitis refers to any of various forms of hepatitis caused by a virus, including both hepatitis A and hepatitis B. As used herein, hepatitis A refers to an infection of the liver that is caused by an RNA virus, is transmitted by ingestion of infected food and water, and has a shorter incubation and generally milder symptoms than hepatitis B. Hepatitis A also is called infectious hepatitis. Unlike viral hepatitis B and C, hepatitis A virus does not cause chronic persistent liver infection.

[0214] As used herein, hepatitis B refers to an acute infection (sometimes fatal) of the liver that is caused by a DNA virus, is transmitted by contaminated blood or blood derivatives in transfusions, by sexual contact with an infected person, or by the use of contaminated needles and instruments. The disease has a long incubation and symptoms that can become severe or chronic, causing serious damage to the liver. Hepatitis B also is called serum hepatitis.

[0215] As used herein, an autoimmune disease refers to a disease or condition in which the body attacks itself and the immune system causes the pathogenic features of the disease or condition. Exemplary autoimmune diseases include scleroderma, lupus, Hashimoto's thyroiditis, and rheumatoid arthritis

[0216] As used herein, multiple sclerosis refers to a pathogenically heterogeneous chronic inflammatory disease of the central nervous system (CNS). Histological hallmarks of active MS include, for example, infiltration of T cells, macrophages and B cells, degradation of myelin (and to a lesser extent, axons) and reactive changes of astrocytes and microglia. Myelin is the fatty sheath that surrounds and protects nerve fibers and its destruction is called demyelination. Demyelination causes nerve impulses to be slowed and/or halted and produces the symptoms of MS. MS is characterized as an autoimmune disease because the inflammatory changes are due to an autoimmune attack against self myelin components. Two forms of MS are relapsing remitting multiple sclerosis (RRMS) and primary progressive multiple sclerosis (PPMS).

[0217] As used herein, an exacerbation, attack, relapse and flare with reference to MS, refer to a sudden worsening of an MS symptom or symptoms, or the appearance of new symptoms, which last at least 24 hours and are separated from a previous exacerbation by at least one month.

[0218] As used herein, rheumatoid arthritis refers to a chronic inflammatory disease that affects the synovial tissue in multiple joints, which leads to joint destruction and disability. Activation of T cells is believed to be the causative factor leading to inflammation in RA, which in turn leads to the activation of macrophages and fibroblast-like synoviocytes. Fibroblast-like synoviocytes produce a variety of pro-inflammatory cytokines causing proliferation of synovial tissue associated with destruction of cartilage and bone.

[0219] As used herein, cancer refers to the development and growth of abnormal cells in an uncontrolled manner as is commonly understood by those of skill in the art. Cancers include solid tumors and blood born cancers, such as leukemias. Cancers tend to invade surrounding tissues, and spread to distant sites of the body via the blood stream and lymphatic system. Cancer includes any of various malignant neoplasmas characterized by the proliferation of anaplastic cells that tend to invade surrounding tissue and metastasize to new body sites. Cancer includes lung, prostate, bladder, breast, cervical, kidney and ovarian cancers and also lymphomas and leukemias.

[0220] As used herein, a tumor refers to an abnormal growth of tissue resulting from uncontrolled, progressive multiplication of cells with no physiological function or to a neoplasm.

[0221] As used herein, cancer cells include malignant neoplastic, anaplastic, metastatic, hyperplastic, dysplastic, neoplastic, malignant tumor (solid or blood-borne) cells that display abnormal growth in the body in an uncontrolled manner.

[0222] As used herein, neoplasm refers to new and abnormal growth of tissue, which can be cancerous, such as a malignant tumor.

[0223] As used herein, neoplastic disease, means a disease brought about by the existence of a neoplasm in the body.

[0224] As used herein, metastasis refers to the migration of cancerous cells to other parts of the body.

[0225] As used herein, hyperplasia refers to an abnormal increase in the number of cells in an organ or a tissue with consequent enlargement. As used herein, neoplasm and dysplasia refer to abnormal growth of tissues, organs or cells. As used herein, malignant means cancerous or tending to metastasize. As used herein, anaplastic means cells that have become less differentiated.

[0226] As used herein, leukemia refers to a cancer of the blood cells. Any of various acute or chronic neoplastic diseases of the bone marrow in which unrestrained proliferation of white blood cells occurs, usually accompanied by anemia, impaired blood clotting, and enlargement of the lymph nodes, liver and spleen. Leukemia occurs when bone marrow cells multiply abnormally cased by mutations in the DNA of stem cells. Bone marrow stem cells, as used herein, refer to undifferentiated stem cells that differentiate into red blood cells and white blood cells. Leukemia is characterized by an excessive production of abnormal white blood cells, overcrowding the bone marrow and spilling into peripheral blood. Various types of leukemias spread to lymph nodes, spleen, liver, the central nervous system and other organs and tissues.

[0227] As used herein, lymphoma refers to a malignant tumor that arises in the lymph nodes or other lymphoid tissue.

[0228] As used herein, treatment means any manner in which the symptoms of a condition, disorder or disease are ameliorated or otherwise beneficially altered. Treatment also encompasses any pharmaceutical use of the compositions herein.

[0229] As used herein, “treating” a subject with a disease or condition means at the subject's symptoms are partially or totally alleviated, or remain static following treatment. Hence treatment encompasses prophylaxis, therapy and/or cure. Prophylaxis refers to prevention of a potential disease and/or a prevention of worsening of symptoms or progression of a disease. Treatment also encompasses any pharmaceutical use of a modified interferon and compositions provided herein.

[0230] As used herein, “therapeutically effective amount” or “therapeutically effective dose” refers to an agent, compound, material, or composition containing a compound that is at least sufficient to produce a therapeutic effect.

[0231] As used herein, “patient” or “subject” to be treated includes humans and human or non-human animals. Mammals include, primates, such as humans, chimpanzees, gorillas and monkeys; domesticated animals, such as dogs, horses, cats, pigs, goats, cows; and rodents such as mice, rats, hamsters and gerbils.

[0232] As used herein, “a naked polypeptide chain” refers to a polypeptide that is not post-translationally-modified or otherwise chemically-modified, but contains only covalently linked amino acids.

[0233] As used herein, a polypeptide complex includes polypeptides produced by chemical modification or post-translational modification. Such modifications include, but are not limited to, pegylation, albumination, glycosylation, farnysylation, phosphorylation and other polypeptide modifications known in the art.

[0234] As used herein, “output signal” refers to parameters that can be followed over time and, optionally, quantified. For example, when a recombinant protein is introduced into a cell, the cell containing the recombinant protein undergoes a number of changes. Any such change that can be monitored and used to assess the transformation or transfection is an output signal, and the cell is referred to as a reporter cell; the encoding nucleic acid is referred to as a reporter gene; and the construct that includes the encoding nucleic acid is a reporter construct. Output signals include, but are not limited to, enzyme activity, fluorescence, luminescence, amount of product produced and other such signals. Output signals include expression of a gene or gene product, including heterologous genes (transgenes) inserted into the plasmid virus. Output signals are a function of time (“t”) and are related to the amount of protein used in the composition. For higher concentrations of protein, the output signal can be higher or lower. For any particular concentration, the output signal increases as a function of time until a plateau is reached. Output signals also can measure the interaction between cells, expressing heterologous genes and biological agents.

[0235] As used herein, the Hill equation is a mathematical model that relates the concentration of a drug (i.e., test compound or substance) to the response measured

$$y = \frac{{{y}_{max} [ D ]}^{x}}{{[ D ]}^{n} + {[ {D}_{50} ]}^{n}}$$

where y is the variable measured (e.g., such as a response signal) yₘₐₓ is the maximal response achievable, [D] is the molar concentration of a drug, [D₅₀] is the concentration that produces a 50% maximal response to the drug, n is the slope parameter, which is 1 if the drug binds to a single site and with no cooperativity between or among sites. A Hill plot is log₁₀ of the ratio of ligand-occupied receptor to free receptor vs log [D] (M). The slope is n, where a slope of greater than 1 indicates cooperativity among binding sites and a slope of less than 1 can indicate heterogeneity of binding. This equation has been employed in methods for assessing interactions in complex biological systems (see, published International PCT application No. WO 01/44809 based on PCT No. PCT/FR00/03503).

[0236] As used herein, in the Hill-based analysis (see, e.g., published International PCT application No. WO 01/44809 based on PCT No. PCT/FR00/03503), the parameters, π, κ, τ, ε, η, θ, are as follows:

[0237] π is the potency of the biological agent acting on the assay (cell-based) system;

[0238] κ is the constant of resistance of the assay system to elicit a response to a biological agent;

[0239] ε is the global efficiency of the process or reaction triggered by the biological agent on the assay system;

[0240] τ is the apparent titer of the biological agent;

[0241] θ is the absolute titer of the biological agent; and

[0242] η is the heterogeneity of the biological process or reaction.

[0243] In particular, as used herein, the parameters π (potency) or κ (constant of resistance) are used, respectively, to assess the potency of a test agent to produce a response in an assay system and the resistance of the assay system to respond to the agent.

[0244] As used herein, ε (efficiency) is the slope at the inflexion point of the Hill curve (or, in general, of any other sigmoidal or linear approximation), to assess the efficiency of the global reaction (the biological agent and the assay system taken together) to elicit the biological or pharmacological response.

[0245] As used herein, τ (apparent titer) is used to measure the limiting dilution or the apparent titer of the biological agent.

[0246] As used herein, θ (absolute titer) is used to measure the absolute limiting dilution or titer of the biological agent.

[0247] As used herein, η (heterogeneity) measures the existence of discontinuous phases along the global reaction, which is reflected by an abrupt change in the value of the Hill coefficient or in the constant of resistance.

[0248] As used herein, a population of sets of nucleic acid molecules encoding a collection (library) of mutants refers to a collection of plasmids or other vehicles that carry (encode) the gene variants. Thus, individual plasmids or other individual vehicles carry individual gene variants. Each element (member) of the collection is physically separated from the others in an appropriate addressable array and has been generated as the single product of an independent mutagenesis reaction. When a collection (library) of such proteins is contemplated, it will be so-stated. A library, contains three, four, five, 10, 50, 100, 500, 1000, 10³, 10⁴ or more modified IFN-β polypeptides.

[0249] As used herein, a “reporter cell” is the cell that undergoes the change in response to a condition. For example, in response to exposure to a protein or a virus or to a change it its external or internal environment, the reporter cell “reports” (i.e., displays or exhibits the change).

[0250] As used herein, “reporter” or “reporter moiety” refers to any moiety that allows for the detection of a molecule of interest, such as a protein expressed by a cell. Reporter moieties include, but are not limited to, fluorescent proteins (e.g., red, blue and green fluorescent proteins), LacZ and other detectable proteins and gene products. For expression in cells, nucleic acids encoding the reporter moiety can be expressed as a fusion protein with a protein of interest or under the control of a promoter of interest.

[0251] As used herein, phenotype refers to the physical, physiological or other manifestation of a genotype (a sequence of a gene). In methods herein, phenotypes that result from alteration of a genotype are assessed.

[0252] As used herein, the amino acids which occur in the various sequences of amino acids provided herein are identified according to their known, three-letter or one-letter abbreviations (Table 1). The nucleotides which occur in the various nucleic acid fragments are designated with the standard single-letter designations used routinely in the art.

[0253] As used herein, an “amino acid” is an organic compound containing an amino group and a carboxylic acid group. A polypeptide contains two or more amino acids. For purposes herein, amino acids include the twenty naturally-occurring amino acids, non-natural amino acids and amino acid analogs (i.e., amino acids wherein the α-carbon has a side chain).

[0254] As used herein, the abbreviations for any protective groups, amino acids and other compounds are, unless indicated otherwise, in accord with their common usage, recognized abbreviations, or the IUPAC-IUB Commission on Biochemical Nomenclature (Biochem. 11: 1726 (1972)). Each naturally occurring L-amino acid is identified by the standard three letter code (or single letter code) or the standard three letter code (or single letter code) with the prefix “L-;” the prefix “D-” indicates that the stereoisomeric form of the amino acid is D.

[0255] As used herein, “amino acid residue” refers to an amino acid formed upon chemical digestion (hydrolysis) of a polypeptide at its peptide linkages. The amino acid residues described herein are presumed to be in the “L” isomeric form. Residues in the “D” isomeric form, which are so designated, can be substituted for any L-amino acid residue as long as the desired functional property is retained by the polypeptide. NH₂ refers to the free amino group present at the amino terminus of a polypeptide. COOH refers to the free carboxy group present at the carboxyl terminus of a polypeptide. In keeping with standard polypeptide nomenclature described in J. Biol. Chem., 243: 3552-3559 (1969), and adopted 37 C.F.R. §§ 1.821-1.822, abbreviations for amino acid residues are shown in Table 1:

TABLE 1
Table of Correspondence

| SYMBOL | | |
|---|---|---|
| 1-Letter | 3-Letter | AMINO ACID |
| Y | Tyr | Tyrosine |
| G | Gly | Glycine |
| F | Phe | Phenylalanine |
| M | Met | Methionine |
| A | Ala | Alanine |
| S | Ser | Serine |
| I | Ile | Isoleucine |
| L | Leu | Leucine |
| T | Thr | Threonine |
| V | Val | Valine |
| P | Pro | proline |
| K | Lys | Lysine |
| H | His | Histidine |
| Q | Gln | Glutamine |
| E | Glu | glutamic acid |
| Z | Glx | Glu and/or Gln |
| W | Trp | Tryptophan |
| R | Arg | Arginine |
| D | Asp | aspartic acid |
| N | Asn | asparagines |
| B | Asx | Asn and/or Asp |
| C | Cys | Cysteine |
| X | Xaa | Unknown or other |

[0256] All amino acid residue sequences represented herein by formulae have a left to right orientation in the conventional direction of amino-terminus to carboxyl-terminus. In addition, the phrase “amino acid residue” includes the amino acids listed in the Table of Correspondence (Table 1) and modified and unusual amino acids, such as those referred to in 37 C.F.R. §§ 1.821-1.822. A dash at the beginning or end of an amino acid residue sequence indicates a peptide bond to a further sequence of one or more amino acid residues, to an amino-terminal group such as NH₂ or to a carboxyl-terminal group such as COOH.

[0257] As used herein, “naturally occurring amino acid” refers to any of the 20 L-amino acids that occur in polypeptides.

[0258] As used herein, the term “non-natural amino acid” refers to an organic compound that has a structure similar to a natural amino acid but has been modified structurally to mimic the structure and reactivity of a natural amino acid. Non-naturally occurring amino acids are known to those of skill in the art, and, include, for example, amino acids or analogs of amino acids other than the 20 naturally-occurring amino acids and include, but are not limited to, the D-isostereomers of amino acids. Exemplary non-natural amino acids are described herein and are known to those of skill in the art. Modified polypeptides include those that contain non-natural amino acids in place of natural amino acids.

[0259] As used herein, nucleic acids include DNA, RNA and analogs thereof, including protein nucleic acids (PNA) and mixtures thereof. Nucleic acids can be single- or double-stranded. When referring to probes or primers (optionally labeled with a detectable label, e.g., a fluorescent or a radiolabel), single-stranded molecules are contemplated. Such molecules are typically of a length such that they are statistically unique of low copy number (typically less than 5, generally less than 3) for probing or priming a library. Generally a probe or primer contains at least 10, 20 or 30 contiguous nucleic acid bases of sequence complementary to, or identical to, a gene of interest. Probes and primers can be 5 or more, 10 or more, 20 or more, 30 or more, 50 or more, or 100 or more nucleic acid bases long.

[0260] As used herein, heterologous or foreign nucleic acid, such as DNA and RNA, are used interchangeably and refer to DNA or RNA that does not occur naturally as part of the genome in which it is present or is found at a locus or loci in a genome that differs from that in which it occurs in nature. Heterologous nucleic acid includes nucleic acid not endogenous to the cell into which it is introduced, but that has been obtained from another cell or prepared synthetically. Generally, although not necessarily, such nucleic acid encodes RNA and proteins that are not normally produced by the cell in which it is expressed. Heterologous DNA herein encompasses any DNA or RNA that one of skill in the art recognizes or considers as heterologous or foreign to the cell or locus in or at which it is expressed. Heterologous DNA and RNA also can encode RNA or proteins that mediate or alter expression of endogenous DNA by affecting transcription, translation, or other regulatable biochemical processes. Examples of heterologous nucleic acid include, but are not limited to, nucleic acid that encodes traceable marker proteins (e.g., a protein that confers drug resistance), nucleic acid that encodes therapeutically effective substances (e.g., anti-cancer agents), enzymes and hormones, and DNA that encodes other types of proteins (e.g., antibodies). Hence, herein heterologous DNA or foreign DNA, includes a DNA molecule not present in the exact orientation and position as the counterpart DNA molecule found in the genome. It also can refer to a DNA molecule from another organism or species (i.e., exogenous).

[0261] As used herein, “isolated with reference to a nucleic acid molecule or polypeptide or other biomolecule” means that the nucleic acid or polypeptide has separated from the genetic environment from which the polypeptide or nucleic acid were obtained. It also can mean altered from the natural state. For example, a polynucleotide or a polypeptide naturally present in a living animal is not “isolated,” but the same polynucleotide or polypeptide separated from the coexisting materials of its natural state is “isolated,” as the term is employed herein. Thus, a polypeptide or polynucleotide produced and/or contained within a recombinant host cell is considered isolated. Also intended as an “isolated polypeptide” or an “isolated polynucleotide” are polypeptides or polynucleotides that have been partially or substantially purified from a recombinant host cell or from a native source. For example, a recombinantly produced version of a compound can be substantially purified by the one-step method described in Smith et al., Gene, 67: 31-40 (1988). The terms isolated and purified can be used interchangeably.

[0262] Thus, by “isolated” it is meant that the nucleic acid is free of coding sequences of those genes that, in the naturally-occurring genome of the organism (if any), immediately flank the gene encoding the nucleic acid of interest. Isolated DNA can be single-stranded or double-stranded, and can be genomic DNA, cDNA, recombinant hybrid DNA or synthetic DNA. It can be identical to a starting DNA sequence or can differ from such sequence by the deletion, addition, or substitution of one or more nucleotides.

[0263] As used herein, “isolated” or “purified” preparations from biological cells or hosts mean cell extracts containing the indicated DNA or protein including a crude extract of the DNA or protein of interest. For example, for a protein, a purified preparation can be obtained using a single preparative or biochemical technique or a series of preparative or biochemical techniques, and the DNA or protein of interest can be present at various degrees of purity in these preparations. The procedures can include, but are not limited to, ammonium sulfate fractionation, gel filtration, ion exchange chromatography, affinity chromatography, density gradient centrifugation and electrophoresis.

[0264] As used herein, a preparation of DNA or protein that is “substantially pure” or “isolated” should be understood to mean a preparation free from naturally-occurring materials with which such DNA or protein is normally associated in nature. “Essentially pure” should be understood to mean a highly purified preparation that contains at least 95% of the DNA or protein of interest.

[0265] As used herein, a cell extract that contains the DNA molecule or protein of interest refers to a homogenate preparation or cell-free preparation obtained from cells that express the protein or contain the DNA of interest. The term “cell extract” is intended to include culture media, especially spent culture media from which the cells have been removed.

[0266] As used herein, a “receptor” refers to a biologically active molecule that specifically binds to (or with) other molecules. The term “receptor protein” can be used to more specifically indicate the proteinaceous nature of a specific receptor.

[0267] As used herein, “recombinant” refers to any progeny formed as the result of genetic engineering.

[0268] As used herein, a “promoter region” refers to the portion of DNA of a gene that controls transcription of the DNA to which it is operatively linked. The promoter region includes specific sequences of DNA sufficient for RNA polymerase recognition, binding and transcription initiation. This portion of the promoter region is referred to as the “promoter.” In addition, the promoter region includes sequences that modulate this recognition, binding and transcription initiation activity of the RNA polymerase. Promoters, depending upon the nature of the regulation, can be constitutive or regulated by cis acting or trans acting factors.

[0269] As used herein, the phrase “operatively-linked” generally means the sequences or segments have been covalently joined into one piece of DNA, whether in single- or double-stranded form, whereby control or regulatory sequences on one segment control or permit expression or replication or other such control of other segments. The two segments are not necessarily contiguous. For gene expression, a DNA sequence and a regulatory sequence(s) are connected in such a way to control or permit gene expression when the appropriate molecular, e.g., transcriptional activator proteins, are bound to the regulatory sequence(s).

[0270] As used herein, “production by recombinant means by using recombinant DNA methods” means the use of the well-known methods of molecular biology for expressing proteins encoded by cloned DNA, including cloning expression of genes and methods, such as gene shuffling and phage display with screening for desired specificities.

[0271] As used herein, a splice variant refers to a variant produced by differential processing of a primary transcript of genomic DNA that results in more than one type of mRNA.

[0272] As used herein, a composition refers to any mixture of two or more products or compounds (e.g., agents, modulators, regulators, etc.). It can be a solution, a suspension, liquid, powder, a paste, aqueous, non-aqueous formulations or any mixtures thereof.

[0273] As used herein, “a combination” refers to any association between two or more items or elements.

[0274] As used herein, an “article of manufacture” is a product that is made and sold and that includes a container and packaging, and optional instructions for use of the product. For purposes herein, articles of manufacture encompass packaged modified interferon-β polypeptides and/or encoding nucleic acid molecules.

[0275] As used herein, a “kit” refers to a combination of a modified interferon-β polypeptide or nucleic acid molecule provided herein and another item for a purpose including, but not limited to, administration, diagnosis, and assessment of a biological activity or property. Kits also include instructions for use.

[0276] As used herein, “substantially identical to a product” means sufficiently similar so that the property of interest is sufficiently unchanged so that the substantially identical product can be used in place of the product.

[0277] As used herein, vector (or plasmid) refers to discrete elements that are used to introduce heterologous DNA into cells for either expression or replication thereof. Selection and use of such vehicles are well within the skill of the artisan. “Vector” refers to a nucleic acid molecule that transport another nucleic acid to which it has been linked. One type of exemplary vector is an episome, i.e., a nucleic acid capable of extra-chromosomal replication. Exemplary episomal vectors are those capable of autonomous replication and/or expression of nucleic acids to which they are linked; such vectors typically include origins of replication. Vectors also can be designed for integration into host chromosomes. Vectors capable of directing the expression of genes to which they are operatively linked are referred to herein as “expression vectors.” Expression vectors are often in the form of “plasmids,” which refer generally to circular double-stranded DNA loops which, in their vector form are not bound to the chromosome. “Plasmid” and “vector” are used interchangeably as the plasmid is the most commonly used form of vectors. Other such other forms of expression vectors that serve equivalent functions and that become known in the art subsequently hereto.

[0278] As used herein, vector also includes “virus vectors” or “viral vectors.” Viral vectors are engineered viruses that are operatively linked to exogenous genes to transfer (as vehicles or shuttles) the exogenous genes into cells.

[0279] As used herein, an adenovirus refers to any of a group of DNA-containing viruses that cause conjunctivitis and upper respiratory tract infections in humans. As used herein, naked DNA refers to histone-free DNA that can be used for vaccines and gene therapy. Naked DNA is the genetic material that is passed from cell to cell during a gene transfer processed called transformation. In transformation, purified or naked DNA is taken up by the recipient cell which will give the recipient cell a new characteristic or phenotype.

[0280] As used herein, “allele,” which is used interchangeably herein with “allelic variant” refers to alternative forms of a gene or portions thereof. Alleles occupy the same locus or position on homologous chromosomes. When a subject has two identical alleles of a gene, the subject is homozygous for that gene or allele. When a subject has two different alleles of a gene, the subject is heterozygous for the gene. Alleles of a specific gene can differ from each other in a single nucleotide or several nucleotides, and can include substitutions, deletions and insertions of nucleotides. An allele of a gene also can be a form of a gene containing a mutation.

[0281] As used herein, the terms “gene” or “recombinant gene” refer to a nucleic acid molecule having an open reading frame and including at least one exon and, optionally, an intron-encoding sequence. A gene can be either RNA or DNA. Genes can include regions preceding and following the coding region (leader and trailer).

[0282] As used herein, “intron” refers to a DNA sequence present in a given gene which is spliced out during mRNA maturation.

[0283] As used herein, “nucleotide sequence complementary to the nucleotide sequence encoding the amino acid sequence set forth in SEQ ID NO:” refers to the nucleotide sequence of the complementary strand of a nucleic acid strand encoding an amino acid sequence having the particular SEQ ID NO:. The term “complementary strand” is used herein interchangeably with the term “complement.” The complement of a nucleic acid strand can be the complement of a coding strand or the complement of a non-coding strand. When referring to double-stranded nucleic acids, the complement of a nucleic acid encoding an amino acid sequence having a particular SEQ ID NO: refers to the complementary strand of the strand encoding the amino acid sequence set forth in the particular SEQ ID NO: or to any nucleic acid having the nucleotide sequence of the complementary strand of the particular nucleic acid sequence. When referring to a single-stranded nucleic acid having a nucleotide sequence, the complement of this nucleic acid is a nucleic acid having a nucleotide sequence which is complementary to that of the particular nucleic acid sequence. As used herein, the term “coding sequence” refers to that portion of a gene that encodes a sequence of amino acids present in a protein.

[0284] As used herein, the term “sense strand” refers to that strand of a double-stranded nucleic acid molecule that has the sequence of the mRNA that encodes the sequence of amino acids encoded by the double-stranded nucleic acid molecule.

[0285] As used herein, the term “anti-sense strand” refers to that strand of a double-stranded nucleic acid molecule that is the complement of the sequence of the mRNA that encodes the sequence of amino acids encoded by the double-stranded nucleic acid molecule.

[0286] As used herein, an “array” refers to a collection of elements, such as nucleic acid molecules, containing three or more members. An addressable array is one in which the members of the array are identifiable, typically by position on a solid phase support or by virtue of an identifiable or detectable label, such as by color, fluorescence, electronic signal (i.e., RF, microwave or other frequency that does not substantially alter the interaction of the molecules of interest), bar code or other symbology, chemical or other such label. In certain embodiments, the members of the array are immobilized to discrete identifiable loci on the surface of a solid phase or directly or indirectly linked to or otherwise associated with the identifiable label, such as affixed to a microsphere or other particulate support (herein referred to as beads) and suspended in solution or spread out on a surface.

[0287] As used herein, a “support” (e.g., a matrix support, a matrix, an insoluble support or solid support, etc.) refers to any solid or semisolid or insoluble support to which a molecule of interest (e.g., a biological molecule, organic molecule or biospecific ligand) is linked or contacted. Such materials include any materials that are used as affinity matrices or supports for chemical and biological molecule syntheses and analyses, such as, but are not limited to: polystyrene, polycarbonate, polypropylene, nylon, glass, dextran, chitin, sand, pumice, agarose, polysaccharides, dendrimers, buckyballs, polyacryl-amide, silicon, rubber, and other materials used as supports for solid phase syntheses, affinity separations and purifications, hybridization reactions, immunoassays and other such applications. The matrix herein can be particulate or can be in the form of a continuous surface, such as a microtiter dish or well, a glass slide, a silicon chip, a nitrocellulose sheet, nylon mesh, or other such materials. When particulate, typically the particles have at least one dimension in the 5-10 mm range or smaller. Such particles, referred collectively herein as “beads,” are often, but not necessarily, spherical. Such reference, however, does not constrain the geometry of the matrix, which can be any shape, including random shapes, needles, fibers, and elongated. Roughly spherical beads, particularly microspheres that can be used in the liquid phase, also are contemplated. The beads can include additional components, such as magnetic or paramagnetic particles (see, for example, Dynabeads (Dynal, Oslo, Norway)) for separation using magnets as long as the additional components do not interfere with the methods and analyses herein.

[0288] As used herein, matrix or support particles refer to matrix materials that are in the form of discrete particles. The particles have any shape and dimensions, but typically have at least one dimension that is 100 mm or less, 50 mm or less, 10 mm or less, 1 mm or less, 100 μm or less, 50 μm or less and typically have a size that is 100 mm³ or less, 50 mm³ or less, 10 mm³ or less, and 1 mm³ or less, 100 μm³ or less and can be order of cubic microns. Such particles are collectively called “beads.”

[0289] As used herein, the abbreviations for any protective groups, amino acids and other compounds are, unless indicated otherwise, in accord with their common usage, recognized abbreviations, or the IUPAC-IUB Commission on Biochemical Nomenclature (Biochem., 11: 942-944 (1972)).

### B. INTERFERON-BETA (IFN-β)

[0290] Interferons (IFNs) encompass a family of small secreted proteins that can function as extracellular messengers in a variety of biological processes and pathways. IFNs are a family of functionally related cytokines that exhibit anti-viral, anti-proliferative, and immunomodulatory activities. They are divided into three groups: the type I IFNs, the type II IFN (IFN-γ), and a third class called IFN-lambda which contains three isoforms (IL29, IL28A, and IL28B). IFN-β is a member of the type I class of interferons (IFNs) according to its physical and functional properties and its shared receptor. Type I interferons also include subtypes alpha (α), omega (ω), epsilon (ε), and tau (τ). There are at least 13 different alpha isoforms subtypes that exhibit slightly different specificities. Type I interferons are found in many species, including rats, mice, and most other mammals, and also have been identified in birds, reptiles and fish species. Synthesis of interferons is induced in response to chemical or biological agents including viruses and bacteria.

[0291] Interferons, including interferon β (IFN-β), are used as therapeutic agents. Treatment with IFN-β is an established therapy. IFN-β is used, for example, as a therapeutic for treatment of diseases such as multiple sclerosis (MS), rheumatoid arthritis and Crohn's disease. However, patients receiving IFN-β are subject to frequent, repeat applications of the drug due to the well-known instability of IFN-β in the blood stream and under storage conditions. Hence, improved IFN-β stability (half-life) in vivo, such as in serum or following oral administration, and/or in in vitro applications can improve its activity and efficiency as a drug. Accordingly, provided herein are modified IFN-β polypeptides that display improved protein stability as assessed by properties such as resistance to proteases and/or increased conformational stability such as due to increased thermal tolerance, thereby possessing increased protein half-life. The modified polypeptides can possess increased stability in the bloodstream or following oral administration (in vivo) and/or under storage conditions (in vitro).

[0292] 1. IFN-β Polypeptide and Expression Thereof

[0293] The gene for IFN-β lacks introns, and encodes a protein possessing 29% sequence identity with human IFN-α and 50% sequence identity to murine IFN-β. The human IFN-β polypeptide has a molecular weight of 22 kDa. The exemplary human IFN-β gene encodes a precursor polypeptide containing 187 amino acids, including a 21 amino acid signal peptide (SEQ ID NO: 2). Mature IFN-β polypeptides can be of variable length typically including polypeptides of 166 amino acids (SEQ ID NO:1), 164 and 165 amino acids in length. Commercial forms of IFN-β include those sold under the trademarks AVONEX®, BETASERON®, and Rebif®. IFN-β-1a (SEQ ID NO:1, Avonex®, Biogen Inc, CA, USA, and Rebif®, Serono Inc., Geneva, Switzerland) is produced in CHO cells into which cDNA encoding IFN-β has been introduced. IFN-β-1a is 166 amino acids in length and is identical to fibroblast-derived human IFN-β, including glycosylation at the asparagine residue on position 80 (Nelissen et al. Brain 126: 1371-1381 (2003)). Rebif® IFN-β-1a differs from Avonex® IFN-β-1a in that it is formulated for administration to the skin (i.e., subcutaneously) rather than intramuscular administration. IFN-β-1b (SEQ ID NO:3, Betaseron®, Berlex laboratories, Richmond, Calif., USA) is produced in E. coli that bears a genetically engineered plasmid encoding human IFN-β. The resulting expressed IFN-β-1b product is not glycosylated, is lacking the amino terminal methionine (Met1), and the cysteine residue at position 17 is mutated to a serine. IFN-β-1b is 165 amino acids in length and does not include the carbohydrate side chains that are found in natural human IFN-β (Nelissen et al. Brain 126: 1371-1381 (2003)).

[0294] Human IFN-β and recombinant IFN-β-1a are N-glycosylated at the asparagine residue at position 80. The glycan present on natural IFN-β and recombinant IFN-β-1a is an oligosaccharide chain of the biantennary complex type, containing an α1-6 linked fucose on the peptide proximal N-acetyl-glucosamine (GlcNac) residue and two a 2-3 linked N-acetyl-neuraminic (NANA) on the terminal galactose residues. This glycan possesses a rigid structure and interacts with the side chain of two amino acids (Q23 in helix A and N86 in helix C) via hydrogen bonds.

[0295] The hydrophobic area at the vicinity of the glycosylation site is formed by the interface between helices A and C. There are a few polar interactions among the residues of these helices. Thus, this zone is rendered susceptible to denaturation. In the absence of glycosylation, the protein should be destabilized, which could lead to the opening of the interface between helices A and C and, thus, exposure of Cys17. Cys17 becomes reactive and some intermolecular disulfide bridges can be formed; mutation of Cys17 to Ser17 prevents the formation of these disulfide bridges but not the protein aggregation.

[0296] The relative in vitro potencies of IFN-β-1a and IFN-β-1b have been compared in functional assays demonstrating that the specific activity of IFN-β-1a is approximately 10-fold greater than the specific activity of IFN-β-1b (Runkel et al., 1998, Pharm. Res. 15: 641-649). The structural basis for these activity differences has been attributed to differences in glycosylation between the two polypeptide forms of IFN-β. The effect of the carbohydrate was largely manifested through its stabilizing role on structure. The stabilizing effect of the carbohydrate was evident in thermal denaturation experiments. For example, non-glycosylated IFN-β, such as IFN-β-1b, possesses an intact secondary structure, but is more sensitive to thermal denaturation (i.e., denaturation at 4-5° C. lower than the glycosylated protein). Lack of glycosylation also was correlated with an increase in aggregation and an increased sensitivity to thermal denaturation. Enzymatic removal of the carbohydrate from IFN-β-1a with PNGase F caused extensive precipitation of the deglycosylated product. Glycosylation also is attributed to the increased susceptibility of IFN-β-1b to proteolysis, such as proteolysis by gelatinase B, compared to IFN-β-1a.

[0297] IFN-β is produced by many cell types, including macrophages, dendritic cells, fibroblasts, endothelial cells, and others. Typically, IFN-β is produced in response to infection such as by inflammatory stimuli including cytokines (e.g., IL-1, IL-2, IL-12, TNF, or CSF), or in response to infection by a virus. For example, double-stranded RNA (dsRNA) is one of the primary intracellular signals for IFN-β production. Healthy cells do not normally contain dsRNA, which is often produced during viral replication as it forms the genome of many viruses. Several transcription factors have been identified that regulate the IFN-β gene such as for example IRF-1 and IRF-2 (Harada et al., (1998) Biochime, 80: 641-650).

[0298] 2. IFN-β Structure

[0299] Structurally, IFNs are members of the helical cytokine family, also known as the hematopoietic growth factor family that are characterized by a similar four-helical bundle topology. Other members of this family include, but are not limited to, growth hormone (GH), interleukins (IL), granulocyte colony-stimulating factor (G-CSF), erythropoietin, leptin, and others. The crystal structure of human IFN-β has been determined (Karpusas et al., (1997) PNAS, 94: 11813-11818) IFN-β is a globular protein containing 5 alpha (α) helices. It has a calculated molecular weight of 20 kDa and an apparent molecular weight of 25 kDA due to glycosylation. The secondary structure of the five α helices (A to E) is connected with inter-helical loops (AB, BC, CD, DE). The AB loop (residues F15 to E42 of the mature chain) and the E helix (residues V148 to N158 of the mature chain) of IFN-β constitute the regions interacting with IFNAR2 chain of the receptor. The B helix, (residues Q64 to D73 of the mature chain), C helix (residues Y92 to T100 of the mature chain) and D helix (residues R128 to E137 of the mature chain) of IFN-β constitute the regions interacting with the IFNAR1 chain of the receptor. IFN-β possesses a disulfide bridge between cysteines 31 and 141 of the mature polypeptide. This disulfide bridge links loops AB and DE and the stabilization of the AB loop by this disulfide bridge appears to play an important role in the binding to the receptor. Crystallographic data indicate that IFN-β can be a dimer, which is an artifact of the crystallization process since IFN-β does not dimerize in vivo. The two molecules of the dimer are coupled by a zinc atom coordinated by histidine 121 of one IFN-β molecule and histidines 93 and 97 of a second IFN-β molecule in the dimer. A water molecule completes the tetrahedral coordination of the zinc atom. The AB loop and D helix of one IFN-β molecule of the dimer and A/C helices of the other IFN-β molecule of the dimer make some hydrophobic contacts.

[0300] Mutagenesis studies have identified regions on IFN-β that interact with IFNAR1 and IFNAR2 receptor polypeptides that constitute the common receptor for Interferon Type I molecules. The AB loop and the E helix of IFN-β constitute the regions interacting with IFNAR2 chain of the receptor. The B helix, C helix and D helix of IFN-β constitute the regions interacting with the IFNAR1 chain of the receptor. These two regions that interact with the receptor define two continuous zones on IFN-β that correspond to two opposite faces on the cytokine. Each of these regions is characterized by a core of uncharged residues and the presence of peripheral charged residues (mainly positively charged arginine and lysine residues).

[0301] This distribution of charged and uncharged residues observed in IFN-β and IFN-α-2a, can contribute to the specificity of action of each interferon. The uncharged residues making up region N86-N90 of IFN-β do not seem to be directly involved in mediating interactions of the cytokine with the receptor. In contrast, the corresponding region in IFN-α-2a, which contains several charged residues (i.e., Q23, N80 and N86 in IFN-β are replaced by charged residues (lysine, aspartic acid and arginine respectively)), plays an important role for the binding. Different interferon polypeptide conformations upon interaction with the receptor can account for the different cellular responses that occur upon the interaction of different interferons with the same cellular receptor.

[0302] 3. IFN-β Properties and Activities

[0303] All type I interferon molecules, including IFN-α and IFN-β, bind to a common, ubiquitously expressed, receptor complex known as IFNAR composed of two chains: IFNAR1 (110 kDa) and IFNAR2 (100 kDa). Both chains are required for signal transduction but make varying contributions to the binding of different interferon species. For example, IFN-β appears to bind to both chains of the receptor. In contrast, some IFN-α species bind to only one chain of the receptor. In the presence of IFN-β, the two chains assemble into a functional receptor complex which initiates signal transduction. Upon assembly of the IFNAR complex, the intracellular domains of IFNAR1 and IFNAR2 associate with two Janus-family tyrosine kinases, JAK1 and Tyk2, which transphosphorylate themselves and phosphorylate the receptor. The phosphorylated IFNAR1 and IFNAR2 bind to signal transducer and activator of transcription (STAT1) and STAT2. Following dimerization of the STAT proteins, they migrate to the nucleus to activate transcription of multiple genes. IFN-α and IFN-β also activate other signaling pathways including the PI 3-kinase/Akt, p38 MAP kinase, and Raf-1/ERK kinase cascades. Other signaling molecules activated following stimulation by type I interferons include Vav and Cbl docking protein.

[0304] Binding of type I interferons to the IFNAR receptor leads to the activation of a variety of genes encoding proteins involved in biological processes participating in the maintenance of homeostasis and cellular defense, including anti-viral, anti-proliferative, and immunomodulatory functions. The pleiotropic action of IFN-β is evidenced by the large number of varied and diverse genes induced by IFN-β including cytochromes, cell scaffolding proteins, immunologically active proteins such as complement components, anti-inflammatory cytokines such as IL-10 and TGF-β, and dsRNA adenosine deaminase, among many others. IFN-β also acts to downregulate or inhibit a number of genes including proinflammatory cytokines such as IL-12 and TNF-α. Generally, IFN-β is an anti-inflammatory molecules whose observed effects on a variety of immune cells (e.g., T cells, NK cells, monocytes, macrophages and dendritic cells) include, for example, the following: enhancement of T cell cytotoxity; regulation of antibody production; inhibition of T cell proliferation and migration; downregulation of adhesion molecules; enhanced expression of tumor-associated surface antigens, stimulation of surface molecules such as MHC class I antigens, induction or activation of pro-apoptotic genes and proteins (e.g., tumor necrosis factor-related apoptosis-inducing ligand, caspases, Bak, Bax, and p53), repression of anti-apoptotic genes (e.g., Bcl-2, inhibitor of apoptosis protein), and inhibition of angiogenesis (Pestka et al. Immunological Reviews 202: 8-32 (2004); Holten et al., (2002), Arthritis Research, 4: 346-352).

[0305] For example, in response to viral infection, IFN-β is produced and in turn upregulates the expression of a variety of immune genes involved in MHC Class I antigen presentation including the MHC class I molecule, TAP, Lmp2, and Lmp7. Upregulation of these genes increases the presentation of viral peptides by MHC class I molecules in order to facilitate CD8 T cell recognition and destruction of infected cells. IFN-β also can induce the expression of proteins that inhibit protein translation in virally infected cells thus disrupting viral replication. Examples of such proteins include (2′-5′)-oligoadenylate synthetase and dsRNA dependent protein kinase (Biron et al., (1998), Seminars in Immunology, 10: 383-390). Anti-viral effects of IFN-β also is mediated by the direct activation of Natural Killer (NK) cells which selectively kill virus-infected cells.

[0306] Type I interferons also regulate immunomodulatory functions of macrophages, dendritic cells, and other immune cells and thereby promote the establishment of an immune response to a variety of pathogens. For example, IFN-α and IFN-β can enhance macrophage antibody-dependent cytotoxicity and modulate cytokine production by macrophages. Type I interferons produced by macrophages also play a role in antimicrobial immunity by acting in an autocrine manner to enhance phagocytosis and the induction of iNOS, the enzyme that produces the antimicrobial compound nitric oxide. Further, type I interferons can be produced by antigen-presenting cells (APCs), such as macrophages and dendritic cells, following infection by viruses or other pathogens. For example, IFN-β is secreted from APCs following stimulation of Toll receptors by a variety of viral or bacterial pattern recognition molecules, such as lipopolysaccharides, CpG DNA, or double stranded RNA. Secreted IFN-β acts on APCs to induce the expression of costimulatory molecules required for activation of T cell responses and antibody production. The immunomodulatory action of IFN-β also is evidenced by the inhibition of mitogen-induced T cell proliferation and T cell responses through downregulation of interleukin-12 and/or upregulation of interleukin-10.

[0307] 4. IFN-β as a Biopharmaceutical

[0308] IFN-β is administered as a therapeutic agent. For example, in humans IFN-β is used as a therapeutic for treatment of Multiple Sclerosis (MS), rheumatoid arthritis (RA), and therapy of tumors such as haemangiomas and Kaposi's sarcoma as an antiangiogenic agent. Treatment with IFN-β is a well-established therapy. IFN-β is administered intramuscularly or subcutaneously. Typically, multiple administrations are used in treatment regimens. The formulations typically are stored in refrigerated (2-8° C.) conditions to ensure retention of activity.

[0309] Hence, improved IFN-β stability (half-life) in administered conditions, such as stability in serum or following oral administration and in vitro (e.g., during production, purification and/or storage conditions) improves its utility and efficiency as a drug. Accordingly, provided herein are mutant variants of the IFN-β protein that display improved stability as assessed by resistance to proteases or resistance to denaturation by denaturing agents such as temperature or pH, thereby possessing increased protein half-life. The modified IFN-β proteins that display improved stability possess increased stability in administration conditions such as in the bloodstream, gastrointestinal tract, under low pH conditions (e.g., the stomach), mouth, throat, and/or under storage conditions.

### C. MODIFIED IFN-β AND METHODS OF MODIFICATION

[0310] Provided herein are modified IFN-β proteins. The modified IFN-β proteins (also referred to herein as variants) are increased in protein stability compared to unmodified IFN-β. Mutations of amino acid residues in an IFN-β polypeptide provided herein confer increased protein stability by virtue of a change to the primary sequence of the polypeptide. Other modifications that are or are not in the primary sequence of the polypeptide also can be included, such as, but not limited to, the addition of a carbohydrate moiety following glycosylation of the polypeptide, the addition of a polyethylene glycol (PEG) moiety to the polypeptide, etc. Increasing protein stability (for example, the half-life of protein in vivo) can result in a decrease in the frequency of injections needed to maintain a sufficient drug level in serum, thus leading to, for example: i) higher comfort and acceptance by patients, ii) lower doses necessary to achieve comparable biological effects, and iii) as a consequence of (ii), likely attenuation of any secondary effects.

[0311] Among the modified IFN-β polypeptides provided are those with altered specific structural features or properties that contribute to IFN-β protein stability (half-life). Increased protein stability of IFN-β can be achieved, for example, by (i) destruction of protease target residues or sequences and/or (ii) by destruction of target residues or sequences contributing to conformational stability that are susceptible to denaturation by temperature, pH, or other denaturation agent. Modification of IFN-β to increase protein stability can be accomplished while keeping an activity unchanged compared to the unmodified or wild-type IFN-β. Any methods known in the art can be used to create modified IFN-β proteins. In the methods described herein, modifications are chosen using the method of 2D- or 3D-scanning mutagenesis (see for example, WO 2004/022747 and WO 2004/022593).

[0312] There are several general approaches described for protein-directed evolution based on mutagenesis. Any of these, alone or in combination can be used to modify a polypeptide such as IFN-β to achieve increased conformational stability. Such methods include random mutagenesis, where the amino acids in the starting protein sequence are replaced by all (or a group) of the 20 amino acids either in single or multiple replacements at different amino acid positions are generated on the same molecule, at the same time. Another method, restricted random mutagenesis methods introduces either all of the 20 amino acids or DNA-biased residues. The bias is based on the sequence of the DNA and not on that of the protein, in a stochastic or semi-stochastic manner, respectively, within restricted or predefined regions of the protein, known in advance to be involved in the biological activity being “evolved.” Additionally, as further described herein methods of rational mutagenesis including 1D-scanning, 2D-scanning and 3-D scanning can be used alone or in combination to construct modified IFN-β variants.

[0313] 1. Non-Restricted Rational Mutagenesis One-Dimensional (1D)-Scanning

[0314] Rational mutagenesis, also termed 1-D scanning, is a two-step process and is described in co-pending U.S. application Ser. No. 10/022,249. 1-D scanning can be used to modify IFN-β and, additionally, to identify positions for further modification by other methods such as 2D- and 3D-scanning. Briefly, the first step requires amino acid scanning where all and each of the amino acids in the starting protein sequence, such as IFN-β (SEQ ID NO:1 or 3) are replaced by a third amino acid of reference (e.g., alanine). Only a single amino acid is replaced on each protein molecule at a time. A collection of protein molecules having a single amino acid replacement is generated such that molecules differ from each other by the amino acid position at which the replacement has taken place. Mutant DNA molecules are designed, generated by mutagenesis and cloned individually, such as in addressable arrays, such that they are physically separated from each other and such that each one is the single product of an independent mutagenesis reaction. Mutant protein molecules derived from the collection of mutant nucleic acid molecules also are physically separated from each other, such as by formatting in addressable arrays. Activity assessment on each protein molecule allows for the identification of those amino acid positions that result in a drop in activity when replaced, thus indicating the involvement of that particular amino acid position in the protein's biological activity and/or conformation that leads to fitness of the particular feature being evolved. Those amino acid positions are referred to as HITs.

[0315] At the second step, a new collection of molecules is generated such that each molecule differs from each of the others by the amino acid present at the individual HIT positions identified in step 1. All 20 amino acids (19 remaining) are introduced at each of the HIT positions identified in step 1; while each individual molecule contains, in principle, one and only one amino acid replacement. Mutant DNA molecules are designed, generated by mutagenesis and cloned individually, such as in addressable arrays, such that they are physically separated from each other and such that each one is the single product of an independent mutagenesis reaction. Mutant protein molecules derived from the collection of mutant DNA molecules also are physically separated from each other, such as by formatting in addressable arrays. Activity assessment then is individually performed on each individual mutant molecule. The newly generated mutants that lead to a desired alteration (such as an improvement) in a protein activity are referred to as LEADs. This method permits an indirect search for activity alteration, such as improved stability, improved resistance to proteases and/or thermal conditions, and improved interactions between IFN-β and its receptor, based on one rational amino acid replacement and sequence change at a single amino acid position at a time, in search of a new, unpredicted amino acid sequence at some unpredicted regions along a protein to produce a protein that exhibits a desired activity or altered activity, such as better performance than the starting protein.

[0316] In this approach, neither the amino acid position nor the replacing amino acid type are restricted. Full length protein scanning is performed during the first step to identify HIT positions, and then all 20 amino acids are tested at each of the HIT positions, to identify LEAD sequences; while, as a starting point, only one amino acid at a time is replaced on each molecule. The selection of the target region (HITs and surrounding amino acids) for the second step is based upon experimental data for activity obtained in the first step. Thus, no prior knowledge of protein structure and/or function is necessary. Using this approach, LEAD sequences have been found on proteins that are located at regions of the protein not previously known to be involved in the particular biological activity being modified; thus emphasizing the power of this approach to discover unpredictable regions (HITs) as targets for fitness improvement.

[0317] 2. Two-Dimensional (2D) Rational Scanning

[0318] The 2-Dimensional rational scanning (or “2-dimensional scanning”) methods for protein rational evolution (see, co-pending U.S. application Ser. Nos. 10/658,355 and 10/658,834 and published International applications WO 2004/022593 and WO 2004/022747) are based on scanning over two dimensions. The first dimension scanned is amino acid position along the protein sequence to identify is-HIT target positions, and the second dimension is the amino acid type selected for replacing a particular is-HIT amino acid position. An advantage of the 2-dimensional scanning methods provided herein is that at least one, and typically both, of the amino acid position scan and/or the replacing amino acid scan can be restricted such that fewer than all amino acids on the protein-backbone are selected for amino acid replacement; and/or fewer than all of the remaining 19 amino acids available to replace an original, such as native, amino acid are selected for replacement.

[0319] In particular embodiments, based on i) the particular protein properties to be evolved, ii) the protein's amino acid sequence, and iii) the known properties of the individual amino acids, a number of target positions along the protein sequence are selected, in silico, as “is-HIT target positions.” This number of is-HIT target positions is as large as possible such that all reasonably possible target positions for the particular feature being evolved are included. In particular, embodiments where a restricted number of is-HIT target positions are selected for replacement, the amino acids selected to replace the is-HIT target positions on the particular protein being modified can be either all of the remaining 19 amino acids or, more frequently, a more restricted group having selected amino acids that are contemplated to have the desired effect on protein activity. In another embodiment, so long as a restricted number of replacing amino acids are used, all of the amino acid positions along the protein backbone can be selected as is-HIT target positions for amino acid replacement. Mutagenesis then is performed by the replacement of single amino acid residues at specific is-HIT target positions on the protein backbone (e.g., “one-by-one,” such as in addressable arrays), such that each individual mutant generated is the single product of each single mutagenesis reaction. Mutant DNA molecules are designed, generated by mutagenesis and cloned individually, such as in addressable arrays, such that they are physically separated from each other and that each one is the single product of an independent mutagenesis reaction. Mutant protein molecules derived from the collection of mutant DNA molecules also are physically separated from each other, such as by formatting in addressable arrays. Thus, a plurality of mutant protein molecules are produced. Each mutant protein contains a single amino acid replacement at only one of the is-HIT target positions. Activity assessment is then individually performed on each individual protein mutant molecule, following protein expression and measurement of the appropriate activity. An example of practice of this method is shown in the Examples in which mutant IFN-β molecules are produced.

[0320] The newly generated proteins that lead to altered, typically improvement, in a target protein activity are referred to as LEADs. This method relies on an indirect search for protein improvement for a particular property or feature, such as increased resistance to proteolysis, based on a rational amino acid replacement and sequence change at single or, in another embodiment, a limited number of amino acid positions at a time. As a result, modified proteins that have new amino acid sequences at some regions along the protein that perform better (at a particular target activity or other property) than the starting protein are identified and isolated.

[0321] 2D scanning on IFN-β was used to generate variants improved in protein stability, including improved resistance to proteolysis and improved conformational stability. To effect such modifications, amino acid positions were selected using in silico analysis of IFN-β.

[0322] a. Identifying In-Silico HITs

[0323] The method for directed evolution includes identifying and selecting (using in silico analysis) specific amino acids and amino acid positions (referred to herein as is-HITs) along the protein sequence that are contemplated to be directly or indirectly involved in the feature being evolved. As noted, the 2-dimensional scanning methods provided include the following two-steps. The first step is an in silico search of a target protein's amino acid sequence to identify all possible amino acid positions that potentially can be targets for the property or feature being evolved. This is effected, for example, by assessing the effect of amino acid residues on the property(ies) to be altered on the protein, using any known standard software. The particulars of the in silico analysis is a function of the property to be modified.

[0324] Once identified, these amino acid positions or target sequences are referred to as “is-HITs” (in silico HITs). In silico HITs are defined as those amino acid positions (or target positions) that potentially are involved in the “evolving” feature, such as increased resistance to proteolysis. The discrimination of the is-HITs among all the amino acid positions in a protein sequence can be made based on the amino acid type at each position in addition to the information on the protein secondary or tertiary structure. In silico HITs constitute a collection of mutant molecules such that all possible amino acids, amino acid positions or target sequences potentially involved in the evolving feature are represented. No strong theoretical discrimination among amino acids or amino acid positions is made at this stage. In silico HIT positions are spread over the full length of the protein sequence. Single or a limited number of is-HIT amino acids are replaced at a time on the target protein IFN-β.

[0325] A variety of parameters can be analyzed to determine whether or not a particular amino acid on a protein might be involved in the evolving feature, typically a limited number of initial premises (typically no more than 2) are used to determine the in silico HITs. For example, as described herein, to increase the isoelectric point of IFN-β, the first condition is the nature of the amino acids linked to isoelectric point, e.g. negatively charged amino acids. The second premise is typically related to the specific position of those amino acids along the protein structure. For example, some amino acids were not selected because they lie in a region known to participate in IFN-β-receptor interactions.

[0326] During the first step of identification of is-HITs according to the methods provided herein, each individual amino acid along the protein sequence is considered individually to assess whether it is a candidate for is-HIT. This search is done one-by-one and the decision on whether the amino acid is considered to be a candidate for a is-HIT is based on (1) the amino acid type itself; (2) the position on the amino acid sequence and protein structure if known; and (3) the predicted interaction between that amino acid and its neighbors in sequence and space.

[0327] Using the 3D-scanning methods described herein, once one protein within a family of proteins (e.g., IFN-β within the cytokine family) is modified using the methods provided herein for generating LEAD mutants, is-HITs can be identified on other or all proteins within a particular family by identifying the corresponding amino acid positions therein using structural homology analysis (based upon comparisons of the 3-D structures of the family members with original protein to identify corresponding residues for replacement) as described hereinafter. The is-HITs on family identified in this manner then can be subjected to the next step of identifying replacing amino acids and further assayed to obtain LEADs or super-LEADs as described herein. Similarly, information from 2D-scanning performed on cytokines such as IFN-α, can be used to optimize IFN-β.

[0328] Identified Is-HITs provided herein contribute to a number of properties of IFN-β that participate in protein stability such as removal/modification of protease sensitive sites, and modification of sites susceptible to denaturation and conformational stability (i.e. the addition of charges in the hydrophobic region in helices A and C to favor polar interactions with a solvent, increasing intra-molecular polar interactions between helices A and C, creating intra-molecular disulfide bridges, and changing the isoelectric point (pI)), and combinations thereof. Any of the above modifications contribute to protein stability and thereby, to increasing the half-life of an IFN-β polypeptide in vitro, in vivo or ex vivo.

[0329] b. Identifying Replacing Amino Acids

[0330] Once the is-HITs target positions are selected, the next step is identifying those amino acids that will replace the original, such as native, amino acid at each is-HIT position to alter the activity level for the particular feature being evolved. The set of replacing amino acids to be used to replace the original, such as native, amino acid at each is-HIT position can be different and specific for the particular is-HIT position. The choice of the replacing amino acids takes into account the need to preserve the physicochemical properties such as hydrophobicity, charge and polarity, of essential (e.g., catalytic, binding, etc.) residues. The number of replacing amino acids, of the remaining 19 non-native (or non-original) amino acids, that can be used to replace a particular is-HIT target position ranges from 1 up to about 19, and anywhere in between depending on the properties for the particular modification.

[0331] Numerous methods of selecting replacing amino acids (also referred to herein as “replacement amino acids”) are well known in the art. Protein chemists determined that certain amino acid substitutions commonly occur in related proteins from different species. As the protein still functions with these substitutions, the substituted amino acids are compatible with protein structure and function. Often, these substitutions are to a chemically similar amino acid, but other types of changes, although relatively rare, also can occur.

[0332] Knowing the types of changes that are most and least common in a large number of proteins can assist with predicting alignments and amino acid substitutions for any set of protein sequences. Amino acid substitution matrices are used for this purpose. A number of matrices are available. A detailed presentation of such matrices can be found in the co-pending U.S. application Ser. Nos. 10/658,355 and 10/658,834 and published International applications WO 2004/022593 and WO 2004/022747. Such matrices also are known and available in the art, for example in the reference listed below.

[0333] In amino acid substitution matrices, amino acids are listed across the top of a matrix and down the side, and each matrix position is filled with a score that reflects how often one amino acid would have been paired with the other in an alignment of related protein sequences. The probability of changing amino acid A into amino acid B is assumed to be identical to the reverse probability of changing B into A. This assumption is made because, for any two sequences, the ancestor amino acid in the phylogenetic tree is usually not known. Additionally, the likelihood of replacement should depend on the product of the frequency of occurrence of the two amino acids and on their chemical and physical similarities. A prediction of this model is that amino acid frequencies will not change over evolutionary time (Dayhoff et al., Atlas of Protein Sequence and Structure 5(3): 345-352 (1978)). Several exemplary amino acid substitution matrices, include, but are not limited to, block substitution matrix (BLOSUM) (Henikoff et al., Proc. Natl. Acad. Sci. USA 89: 10915-10919 (1992)), Jones (Jones et al., Comput. Appl. Biosci., 8: 275-282 (1992), Gonnet (Gonnet et al., Science, 256: 1433-1445 (1992)), Fitch (J. Mol. Evol., 16(1):9-16 (1966)), Feng (Feng et al., J. Mol. Evol., 21: 112-125 (1985)), McLachlan (J. Mol. Biol., 61:409-424 (1971)), Grantham (Science 185: 862-864 (1974)), Miyata (J. Mol. Evol. 12: 219-236 (1979)), Rao (J. Pept. Protein Res. 29: 276-281 (1987)), Risler (J. Mol. Biol. 204: 1019-1029 (1988)), Johnson (Johnson et al., J. Mol. Biol. 233: 716-738 (1993)), and percent accepted mutation (PAM) (Dayhoff et al., Atlas of Protein Sequence and Structure, 5(3): 345-352 (1978)).

[0334] Dayhoff and coworkers developed a model of protein evolution that resulted in the development of a set of widely used replacement matrices (Dayhoff et al., Atlas of Protein Sequence and Structure, 5(3):345-352 (1978)) termed percent accepted mutation matrices (PAM). In deriving these matrices, each change in the an amino acid at a particular site is assumed to be independent of previous mutational events at that site. Thus, the probability of change of any amino acid A to amino acid B is the same, regardless of the previous changes at that site and also regardless of the position of amino acid A in a protein sequence.

[0335] In the Dayhoff approach, replacement rates are derived from alignments of protein sequences that are at least 85% identical; this constraint ensures that the likelihood of a particular mutation being the result of a set of successive mutations is low. Because these changes are observed in closely related proteins, they represent amino acid substitutions that do not significantly change the function of the protein. Hence, they are called “accepted mutations,” as defined as amino acid changes that are accepted by natural selection.

[0336] The outcome of the two steps set forth above, which is performed in silico is that: (1) the amino acid positions that will be the target for mutagenesis are identified; these positions are referred to as is-HITs; (2) the replacing amino acids for the original, such as native, amino acids at the is-HITs are identified, to provide a collection of candidate LEAD mutant molecules that are expected to perform different from the native one. These are assayed for a desired modified (or improved or altered) biological activity.

[0337] c. Construction of Modified Proteins and Biological Assays

[0338] Once is-HITs are selected as set forth above, replacing amino acids are introduced. Mutant proteins typically are prepared using recombinant DNA methods and assessed in appropriate biological assays for the particular biological activity (feature) modified. An exemplary method of preparing the mutant proteins is by mutagenesis of the original, such as native, gene using methods well known in the art. Mutant molecules are generated one-by-one, such as in addressable arrays, such that each individual mutant generated is the single product of each single and independent mutagenesis reaction. Individual mutagenesis reactions are conducted separately, such as in addressable arrays where they are physically separated from each other. Once a population of sets of nucleic acid molecules encoding the respective mutant proteins is prepared, each is separately introduced one-by-one into appropriate cells for the production of the corresponding mutant proteins. This also can be performed, for example, in addressable arrays where each set of nucleic acid molecules encoding a respective mutant protein is introduced into cells confined to a discrete location, such as in a well of a multi-well microtiter plate. Each individual mutant protein is individually phenotypically-characterized and performance is quantitatively assessed using assays appropriate for the feature being modified (i.e., feature being evolved). Again, this step can be performed in addressable arrays. Those mutants displaying a desired increased or decreased performance compared to the original, such as native molecules are identified and designated LEADs. From the beginning of the process of generating the mutant DNA molecules up through the readout and analysis of the performance results, each candidate LEAD mutant is generated, produced and analyzed individually, such as from its own address in an addressable array. The process is amenable to automation.

[0339] 3. Three-Dimensional (3D) Scanning

[0340] An additional method of rational evolution of proteins based on the identification of potential target sites for mutagenesis (is-HITs) is through comparison of patterns of protein backbone folding between structurally related proteins, irrespective of the underlying sequences of the compared proteins. Once the structurally related amino acid positions are identified on the new protein, then suitable amino acid replacement criteria, such as PAM analysis, can be employed to identify candidate LEADs for construction and screening.

[0341] For example, analysis of “structural homology” between and among a number of related cytokines can be used to identify on various members of the cytokine family, those amino acid positions and residues that are structurally similar or structurally related. For example, 3D scanning can be used to identify amino acid positions on IFN-β that are structurally similar or structurally related to those found in IFNα-2b mutants that have been modified for improved stability (see, co-pending U.S. application Ser. Nos. 10/658,834 and 10/658,355 and published PCT applications WO2004/022747 and WO2004/022593). This method can be applied to any desired phenotype using any protein, such as a cytokine, as the starting material to which an evolution procedure, such as the rational directed evolution procedure of U.S. application Ser. No. 10/022,249 or the 2-dimensional scanning method described herein. The structurally corresponding residues are then altered on members of the family to produce additional cytokines with similar phenotypic alterations.

[0342] a. Homology

[0343] Typically, homology between proteins is compared at the level of their amino acid sequences, based on the percent or level of coincidence of individual amino acids, amino acid per amino acid, when sequences are aligned starting from a reference, generally the residue encoded by the start codon. For example, two proteins are “homologous” or bear some degree of homology whenever their respective amino acid sequences show a certain degree of matching upon alignment comparison. Comparative molecular biology is primarily based on this approach. From the degree of homology or coincidence between amino acid sequences, conclusions can be made on the evolutionary distance between or among two or more protein sequences and biological systems.

[0344] The concept of “convergent evolution” is applied to describe the phenomena by which phylogenetically-unrelated organisms or biological systems have evolved to share features related to their anatomy, physiology and structure as a response to common forces, constraints, and evolutionary demands from the surrounding environment and living organisms. Alternatively, “divergent evolution,” is applied to describe the phenomena by which strongly phylogenetically related organisms or biological systems have evolved to diverge from identity or similarity as a response to divergent forces, constraints, and evolutionary demands from the surrounding environment and living organisms.

[0345] In the typical traditional analysis of homologous proteins there are two conceptual biases corresponding to: i) “convergent evolution,” and ii) “divergent evolution.” Whenever the aligned amino acid sequences of two proteins do not match well with each other, these proteins are considered “not related” or “less related” with each other and have different phylogenetic origins. There is no (or low) homology between these proteins and their respective genes are not homologous (or show little homology). If these two “non-homologous” proteins under study share some common functional features (e.g., interaction with other specific molecules, activity), they are determined to have arisen by “convergent evolution,” i.e., by evolution of their non-homologous amino acid sequences, in such a way that they end up generating functionally “related” structures.

[0346] On the other hand, whenever the aligned amino acid sequences of two proteins do match with each other to a certain degree, these proteins are considered to be “related” and to share a common phylogenetic origin. A given degree of homology is assigned between these two proteins and their respective genes likewise share a corresponding degree of homology. During the evolution of their initial highly homologous amino acid sequence, enough changes can be accumulated in such a way that they end up generating “less-related” sequences and less related function. The divergence from perfect matching between these two “homologous” proteins under study comes from “divergent evolution.”

[0347] b. 3D-Scanning (Structural Homology) Methods

[0348] Structural homology refers to homology between the topology and three-dimensional structure of two proteins. Structural homology is not necessarily related to “convergent evolution” or to “divergent evolution,” nor is it related to the underlying amino acid sequence. Rather, structural homology is likely driven (through natural evolution) by the need of a protein to fit specific conformational demands imposed by its environment. Particular structurally homologous “spots” or “loci” would not be allowed to structurally diverge from the original structure, even when its own underlying sequence does diverge. This structural homology is exploited herein to identify loci for mutation.

[0349] Within the amino acid sequence of a protein resides the appropriate biochemical and structural signals to achieve a specific spatial folding in either an independent or a chaperon-assisted manner. Indeed, this specific spatial folding ultimately determines protein traits and activity. Proteins interact with other proteins and molecules in general through their specific topologies and spatial conformations. In principle, these interactions are not based solely on the precise amino acid sequence underlying the involved topology or conformation. If protein traits, activity (behavior and phenotypes) and interactions rely on protein topology and conformation, then evolutionary forces and constraints acting on proteins can be expected to act on topology and conformation. Proteins sharing similar functions will share comparable characteristics in their topology and conformation, despite the underlying amino acid sequences that create those topologies and conformations.

[0350] Using the structural similarities and homologies between IFNα-2b and IFN-β, modifications were generated in IFN-β using the 3D-scanning method.

[0351] 4. Super-LEADs and Additive Directional Mutagenesis (ADM)

[0352] IFN-β Modification also can include combining two or more mutations. For example, Additive Directional Mutagenesis (ADM) can be used to assemble on a single mutant protein multiple mutations present on the individual LEAD molecules, so as to generate super-LEAD mutant proteins (see co-pending U.S. application Ser. Nos. 10/658,834 and 10/658,355 and published PCT applications WO 2004/022747 and WO 2004/022593). ADM is a repetitive multi-step process where at each step after the creation of the first LEAD mutant protein a new LEAD mutation is added onto the previous LEAD mutant protein to create successive super-LEAD mutant proteins. ADM is not based on genetic recombination mechanisms, nor on shuffling methodologies; instead it is a simple one-mutation-at-a-time process, repeated as many times as necessary until the total number of desired mutations is introduced on the same molecule. To avoid the exponentially increasing number of all possible combinations that can be generated by putting together on the same molecule a given number of single mutations, a method is provided herein that, although it does not cover all the combinatorial possible space, still captures a big part of the combinatorial potential. “Combinatorial” is used herein in its mathematical meaning (i.e., subsets of a group of elements, containing some of the elements in any possible order) and not in the molecular biological or directed evolution meaning (i.e., generating pools, or mixtures, or collections of molecules by randomly mixing their constitutive elements).

[0353] A population of sets of nucleic acid molecules encoding a collection of new super-LEAD mutant molecules is generated, tested and phenotypically characterized one-by-one in addressable arrays. Super-LEAD mutant molecules are such that each molecule contains a variable number and type of LEAD mutations. Those molecules displaying further improved fitness for the particular feature being evolved, are referred to as super-LEADs. Super-LEADs can be generated by other methods known to those of skill in the art and tested by the high throughput methods herein. For purposes herein a super-LEAD typically has activity with respect to the function or biological activity of interest that differs from the improved activity of a LEAD by a desired amount, such as at least 10%, 20%, 30%, 40%, 50%, 60%, 70%, 80%, 90%, 100%, 150%, 200% or more from at least one of the LEAD mutants from which it is derived. In yet other embodiments, the change in activity is at least about 2 times, 3 times, 4 times, 5 times, 6 times, 7 times, 8 times, 9 times, 10 times, 20 times, 30 times, 40 times, 50 times, 60 times, 70 times, 80 times, 90 times, 100 times, 200 times, 300 times, 400 times, 500 times, 600 times, 700 times, 800 times, 900 times, 1000 times, or more greater than at least one of the LEAD molecules from which it is derived. As with LEADs, the change in the activity for super-LEADs is dependent upon the property that is being “evolved.” The desired alteration, which can be either an increase or a reduction in a feature or property, will depend upon the function or property of interest.

[0354] In one embodiment, the ADM method employs a number of repetitive steps, such that at each step a new mutation is added on a given molecule. Although numerous different ways are possible for combining each LEAD mutation onto a super-LEAD protein, an exemplary way the new mutations (e.g., mutation 1 (m1), mutation 2 (m2), mutation 3 (m3), mutation 4 (m4), mutation 5 (m5), mutation n (mn)) can be added corresponds to the following diagram:

[chemical structure]

[0355] 5. Multi-Overlapped Primer Extensions

[0356] Another method that can be employed to generate combinations of two or more mutations is using oligonucleotide-mediated mutagenesis referred to as “multi overlapped primer extensions.” This method can be used for the rational combination of mutant LEADs to form super-LEADS. This method allows the simultaneous introduction of several mutations throughout a small protein or protein-region of known sequence. Overlapping oligonucleotides of typically around 70 bases in length (since longer oligonucleotides lead to increased error) are designed from the DNA sequence (gene) encoding the mutant LEAD proteins in such a way that they overlap with each other on a region of typically around 20 bases. Although typically about 70 bases are used to create the overlapping oligonucleotides, the length of additional overlapping oligonucleotides for use can range from about 30 bases up to about 100 bases. Likewise, although typically the overlapping region of the overlapping oligonucleotides is about 20 bases, the length of other overlapping regions for use herein can range from about 5 bases up to about 40 bases. These overlapping oligonucleotides (including or not point mutations) act as both template and primers in a first step of PCR (using a proofreading polymerase, e.g., Pfu DNA polymerase, to avoid unexpected mutations) to create small amounts of full-length gene. The full-length gene resulting from the first PCR is then selectively amplified in a second step of PCR using flanking primers, each one tagged with a restriction site in order to facilitate subsequent cloning. One multi overlapped extension process yields a full-length (multi-mutated) nucleic acid molecule encoding a candidate super-LEAD protein having multiple mutations therein derived from LEAD mutant proteins.

### D. MODIFIED IFN-β POLYPEPTIDES EXHIBITING INCREASED PROTEIN STABILITY

[0357] Two approaches were used to increase the protein stability of IFN-β by amino acid replacement or replacements: i) Resistance to proteases by amino acid replacement that leads to higher resistance to proteases by direct destruction of the protease target residue or sequence, while maintaining or improving the requisite biological activity of IFN-β (e.g., anti-viral and anti-proliferation activity), and/or ii) increased conformational stability by amino acid replacement that leads to a decreased susceptibility to denaturation (i.e. by temperature such as at room temperature or at 37° C.), while either improving or maintaining the requisite biological activity (e.g., anti-viral and anti-proliferation activity). An IFN-β polypeptide provided herein exhibiting increased protein stability can lead to an increased half-life of the polypeptide in vivo or in vitro. For example, increased half-life can occur following administration of the polypeptide to a subject, such as a human subject. The increased half-life of the modified IFN-β polypeptide can be increased by an amount that is at least 10%, at least 20%, at least 30%, at least 40%, at least 50%, at least 60%, at least 70%, at least 80%, at least 90%, at least 100%, at least 150%, at least 200%, at least 250%, at least 300%, at least 350%, at least 400%, at least 450%, at least 500% or more compared to the half-life of the unmodified IFN-β polypeptide. In some examples, the increased half-life of the modified IFN-β polypeptide can be increased by an amount that is at least 6 times, 7 times, 8 times, 9 times, 10 times, 20 times, 30 times, 40 times, 50 times, 60 times, 70 times, 80 times, 90 times, 100 times, 200 times, 300 times, 400 times, 500 times, 600 times, 700 times, 800 times, 900 times, 1000 times, or more times when compared to the half-life of the unmodified IFN-β polypeptide. Hence, the modified IFN-β polypeptides provided herein offer IFN-βs with advantages including a decrease in the frequency of injections needed to maintain a sufficient drug level in serum, thus leading to, for example, higher comfort and acceptance by subjects, lower doses necessary to achieve comparable biological effects and attenuation of secondary effects.

[0358] Provided herein are modified IFN-β polypeptides containing modifications that alter any one or more of the properties of IFN-β that contribute to increased protein stability (i.e. increased protease resistance, or increased conformational stability that, for example, renders a polypeptide more resistant to denaturation by temperature or pH changes) and any combinations thereof. Generally, modified polypeptides retain one or more activities of an unmodified IFN-β polypeptide. For example, the modified IFN-β polypeptides provided herein exhibit at least one activity that is substantially unchanged (less than 1%, 5% or 10% changed) compared to the unmodified or wild-type IFN-β. In other examples, the activity of a modified IFN-β polypeptide is increased or is decreased compared to an unmodified IFN-β polypeptide. Activity includes, for example, anti-viral, anti-proliferative, activation of Natural Killer cells, or induction of gene or protein markers by IFN-β. Activity can be assessed in vitro or in vivo and can be compared to the unmodified IFN-β polypeptide, such as for example, the mature, wild-type native IFN-β polypeptide (SEQ ID NO:1), the wild-type precursor IFN-β polypeptide (SEQ ID NO: 2), a commercially available mature IFN-β polypeptide, (e.g., Betaseron, SEQ ID No: 3), or any other IFN-β polypeptide known to one of skill in the art that is used as the starting material.

[0359] Modified IFN-β polypeptides provided herein include human IFN-β variants. Modified IFN-β polypeptides provided herein can be modified at one or more amino acid position corresponding to amino acid positions of a mature IFN-β polypeptide, for example, a mature IFN-β polypeptide having an amino acid sequence set forth in SEQ ID NO:1. IFN-β polypeptides can be modified compared to a mature or precursor IFN-β polypeptide having an amino acid sequence set forth in SEQ ID NO:1 or 2, respectively. IFN-β polypeptides also can be modified compared to a recombinant form of IFN-β having a sequence of amino acids set forth in SEQ ID NO:3. Modified IFN-β polypeptides provided herein also include variants of IFN-β of non-human origin. For example, modified IFN-β polypeptides can be modified compared to a mammalian IFN-β including, chimpanzee, macaque, pig, dog, horse, cow or mouse, such as set forth in any one of SEQ ID NOS:527-533. Modified IFN-β polypeptides also include polypeptides modified compared to IFN-β hybrids, such as for examples, hybrids of an IFN-β polypeptide sequence with an IFN-α polypeptide sequence, and also synthetic IFN-β sequences constructed from IFN-β sequences known in the art.

[0360] Using methods described herein, such as for example the 2D-scanning methodology, one or more target amino acid is-HIT has been identified which can serve to generate candidate LEAD IFN-β polypeptide(s) that exhibit increased protein stability, manifested as increased protease resistance or increased conformational stability as described below, compared to an unmodified IFN-β polypeptide. The following is-HIT positions were identified as targets to increase protein stability of IFN-β: 1, 3, 5, 6, 8, 9, 10, 11, 12, 13, 14, 15, 16, 17, 18, 19, 20, 21, 22, 23, 24, 28, 29, 30, 32, 33, 34, 38, 39, 41, 42, 43, 45, 47, 48, 49, 50, 51, 52, 53, 54, 57, 60, 61, 62, 63, 64, 67, 70, 72, 73, 78, 79, 80, 81, 82, 83, 85, 86, 87, 88, 89, 90, 91, 92, 94, 95, 97, 98, 99, 101, 102, 103, 104, 105, 106, 107, 108, 109, 110, 111, 113, 115, 116, 117, 120, 122, 123, 124, 125, 126, 130, 132, 133, 134, 136, 137, 138, 143, 147, 149, 151, 152, 154, 156, 160, 163, 164, and 165. Amino acid replacement or replacements can correspond to any of the following amino acid positions corresponding to a mature IFN-β polypeptide set forth in SEQ ID NO:1: M1, Y3, L5, L6, F8, L9, Q10, R11, S12, S13, N14, F15, Q16, C17, Q18, K19, L20, L21, W22, Q23, L24, L28, E29, Y30, L32, K33, D34, F38, D39, P41, E42, E43, K45, L47, Q48, Q49, F50, Q51, K52, E53, D54, L57, Y60, E61, M62, L63, Q64, F67, F70, Q72, D73, G78, W79, N80, E81, T82, I83, E85, N86, L87, L88, A89, N90, V91, Y92, Q94, I95, H97, L98, K99, V101, L102, E103, E104, K105, L106, E107, K108, E109, D110, F111, R113, K115, L116, M117, L120, L122, K123, R124, Y125, Y126, L130, Y132, L133, K134, K136, E137, Y138, W143, R147, E149, L151, R152, F154, F156, L160, Y163, L164, and R165. In one example, amino acid modifications can be in an unmodified IFN-β polypeptide, such as for example, an unmodified IFN-β polypeptide having a sequence of amino acids set forth in SEQ ID NO:1 or SEQ ID NO:3.

[0361] IFN-β candidate LEAD polypeptides can include amino acid replacement or replacements at any one or more of the is-HIT positions selected using methods described herein or known in the art, such as obtained using PAM analysis. Examples of exemplary amino acid modifications corresponding to amino acid positions of a mature IFN-β polypeptide that can contribute to an increase in protein stability are set forth in Table 2. Other amino acid modifications can include any one or more amino acid modifications set forth in Table 3 and disclosed in published U.S. Application No. US-2004-0132977-A1. In Table 2 and 3 below, the sequence identifier (SEQ ID No.) is in parenthesis next to each substitution.

[0362] Typically, modifications include replacement (substitution), addition, deletion, or a combination thereof, of amino acid residues as described herein. Modified IFN-β polypeptides include those with 1, 2, 3, 4, 5, 6, 7, 8, 9, 10, 11, 12, 13, 14, 15, 16, 17, 18, 19, 20, or more modified positions. Generally, the modification results in increased stability without losing at least one activity, such as antiviral activity (i.e. retains at least one activity as defined herein) of an unmodified IFN-β polypeptide. A modified IFN-β exhibiting increased protein stability containing a single amino acid change at an is-HIT position compared to an unmodified IFN-β is called a LEAD and a modified IFN-β containing two or more modifications compared to an unmodified IFN-β is called a Super-LEAD as described in detail herein and below. In one example, a modified IFN-β polypeptide candidate LEAD can contain any single amino acid modification set forth in Table 2, or any combination of amino acid modifications set forth in Table 2. In another example, a modified IFN-β polypeptide can contain two or more amino acid modifications set forth in Table 3. A modified IFN-β polypeptide also can contain a combination of amino acid modifications, such as for example, any one or more amino acid modifications set forth in Table 2 in combination with any one or more amino acid modifications set forth in Table 3.

TABLE 2
IFN-β amino acid modifications that contribute
to increased protein stability

| | | | | |
|---|---|---|---|---|
| Y3H (4) | Y3I (5) | L6I (6) | L6V (7) | L6H (534) |
| L6A (535) | R11D (145) | Q18H (623) | Q18S (624) | Q18T (625) |
| Q18N (626) | K19N (536) | L20I (8) | L20V (9) | L20H (537) |
| L20A (538) | L21I (10) | L21V (11) | L21T (539) | L21Q (540) |
| L21H (541) | L21A (542) | Q23H (627) | Q23S (628) | Q23T (629) |
| Q23N (630) | L24I (12) | L24V (13) | L24T (543) | L24Q (544) |
| L24H (545) | L24A (546) | E29N (547) | K33N (548) | D34N (14) |
| D34Q (15) | D34G (549) | F38I (16) | F38V (17) | D39N (550) |
| P41A (18) | P41S (19) | E42N (551) | E43K (134) | E43Q (20) |
| E43H (21) | E43N (22) | K45D (146) | K45N (552) | Q48H (631) |
| Q48S (632) | Q48T (633) | Q48N (634) | Q49H (635) | Q49S (636) |
| Q49T (637) | Q49N (638) | F50I (23) | F50V (24) | Q51H (639) |
| Q51S (640) | Q51T (641) | Q51N (642) | K52D (147) | K52N (553) |
| E53R (135) | E53Q 25) | E53H (26) | E53N (27) | D54K (136) |
| D54Q (29) | D54N (28) | D54G (554) | L57I (30) | L57V (31) |
| L57T (555) | L57Q (556) | L57H (557) | L57A (558) | Y60H (32) |
| Y60I (33) | E61K (137) | E61Q (34) | E61H (35) | E61N (36) |
| M62I (37) | M62V (38) | M62T (559) | M62Q (560) | M62A (561) |
| L63I (39) | L63V (40) | L63T (562) | L63Q (563) | L63H (564) |
| L63A (565) | Q64H (643) | Q64S (644) | Q64T (645) | Q64N (646) |
| F70I (41) | F70V (42) | Q72H (647) | Q72S (648) | Q72T (649) |
| Q72N (650) | D73N (566) | W79H (43) | W79S (44) | E81K (138) |
| E81N (567) | E85K (139) | E85N (568) | L87I (45) | L87V (46) |
| L87H (569) | L87A (570) | L88I (47) | L88V (48) | L88T (571) |
| L88Q (572) | L88H (573) | L88A (574) | L98I (49) | L98V (50) |
| L98H (575) | L98A (576) | K99N (577) | L102I (51) | L102V (52) |
| L102T (578) | L102Q (579) | L102H (580) | L102A (581) | E103K (140) |
| E103N (582) | E104R (141) | E104N (583) | K105D (148) | K105N (584) |
| L106I (53) | L106V (54) | L106T (585) | L106Q (586) | L106H (587) |
| L106A (588) | E107R (142) | E107N (589) | K108D (149) | K108N (590) |
| E109R (143) | E109N (591) | D110K (144) | D110N (592) | R113E (150) |
| K115D (151) | K115Q (56) | K115N (55) | K115S (593) | K115H (594) |
| M117I (57) | M117V (58) | M117T | M117Q | M117A (598) |
| | | (596) | (597) | |
| L122I (59) | L122V (60) | L122T (599) | L122Q (600) | L122H (601) |
| L122A (602) | K123N (603) | R124D (520) | R124E (519) | Y125H (61) |
| Y125I (62) | Y126H (63) | Y126I (64) | Y132H (65) | Y132I (66) |
| L133I (67) | L133V (68) | L133T (604) | L133Q (605) | L133H (606) |
| L133A (607) | K134N (608) | K136N (609) | E137N (610) | W143H (71) |
| W143S (72) | R147H (73) | R147Q (74) | E149Q (75) | E149H (76) |
| E149N (77) | L151I (78) | L151V (79) | L151T (611) | L151Q (612) |
| L151H (613) | L151A (614) | R152D (152) | F154I (80) | F154V (81) |
| F156I (82) | F156V (83) | L160I (84) | L160V (85) | L160T (615) |
| L160Q (616) | L160H (617) | L160A (618) | L164I (86) | L164V (87) |
| L164T (619) | L164Q (620) | L164H (621) | L164A (622) | R165D (153) |

[0363] TABLE 3
Additional IFN-β amino acid modifications that
contribute to increased protein stability

| | | | | |
|---|---|---|---|---|
| M1V (262) | M1I (263) | M1T (264) | M1A (265) | M1Q (261) |
| M1D (322) | M1E (323) | M1K (324) | M1N (325) | M1R (326) |
| M1S (327) | M1C (651) | L5V (266) | L5I (267) | L5T (268) |
| L5Q (269) | L5H (270) | L5A (271) | L5D (328) | L5E (329) |
| L5K (330) | L5R (331) | L5N (332) | L5S (333) | L6D (334) |
| L6E (335) | L6K (336) | L6N (337) | L6Q (338) | L6R (339) |
| L6S (340) | L6T (341) | L6C (652) | F8I (272) | F8V (273) |
| F8D (342) | F8E (343) | F8K (344) | F8R (345) | L9V (274) |
| L9I (275) | L9T (276) | L9Q (277) | L9H (278) | L9A (279) |
| L9D (346) | L9E (347) | L9K (348) | L9N (349) | L9R (350) |
| L9S (351) | Q10D (352) | Q10E (353) | Q10K (354) | Q10N (355) |
| Q10R (356) | Q10S (357) | Q10T (358) | Q10C (653) | R11H (280) |
| R11Q (281) | S12D (359) | S12E (360) | S12K (361) | S12R (362) |
| S13D (363) | S13E (364) | S13K (365) | S13N (366) | S13Q (367) |
| S13R (368) | S13T (369) | S13C (654) | N14D (370) | N14E (371) |
| N14K (372) | N14Q (373) | N14R (374) | N14S (375) | N14T (376) |
| F15I (282) | F15V (283) | F15D (377) | F15E (378) | F15K (379) |
| F15R (380) | Q16D (381) | Q16E (382) | Q16K (383) | Q16N (384) |
| Q16R (385) | Q16S (386) | Q16T (387) | Q16C (655) | C17D (388) |
| C17E (389) | C17K (390) | C17N (391) | C17Q (392) | C17R (393) |
| C17S (394) | C17T (395) | K19Q (284) | K19T (285) | K19S (286) |
| K19H (287) | L20N (396) | L20Q (402) | L20R (398) | L20S (399) |
| L20T (400) | L20D (401) | L20E (397) | L20K (403) | W22S (288) |
| W22H (289) | W22D (404) | W22E (405) | W22K (406) | W22R (407) |
| Q23D (408) | Q23E (409) | Q23K (410) | Q23R (411) | L24D (412) |
| L24E (413) | L24K (414) | L24R (415) | N25H (290) | N25S (291) |
| N25Q (292) | R27H (293) | R27Q (294) | L28V (295) | L28I (296) |
| L28T (297) | L28Q (298) | L28H (299) | L28A (300) | E29Q (301) |
| E29H (302) | Y30H (303) | Y30I (304) | L32V (305) | L32I (306) |
| L32T (307) | L32Q (308) | L32H (309) | L32A (310) | K33Q (311) |
| K33T (312) | K33S (313) | K33H (314) | R35H (315) | R35Q (316) |
| M36V (317) | M36I (318) | M36T (319) | M36Q (320) | M36A (321) |
| D39Q (154) | D39H (155) | D39G (156) | E42Q (157) | E42H (158) |
| K45Q (159) | K45T (160) | K45S (161) | K45H (162) | L47V (163) |
| L47I (164) | L47T (165) | L47Q (166) | L47H (167) | L47A (168) |
| K52Q (169) | K52T (170) | K52S (171) | K52H (172) | F67I (173) |
| F67V (174) | R71H (175) | R71Q (176) | D73Q (177) | D73H (178) |
| D73G (179) | G78D (416) | G78E (417) | G78K (418) | G78R (419) |
| W79D (420) | W79E (421) | W79K (422) | W79R (423) | N80D (424) |
| N80E (425) | N80K (426) | N80R (427) | E81Q (180) | E81H (181) |
| T82D (428) | T82E (429) | T82K (430) | T82R (431) | I83D (432) |
| I83E (433) | I83K (434) | I83R (435) | I83N (436) | I83Q (437) |
| I83S (438) | I83T (439) | E85Q (182) | E85H (183) | N86D (440) |
| N86E (441) | N86K (442) | N86R (443) | N86Q (444) | N86S (445) |
| N86T (446) | L87D (447) | L87E (448) | L87K (449) | L87R (450) |
| L87N (451) | L87Q (452) | L87S (453) | L87T (454) | A89D (455) |
| A89E (456) | A89K (457) | A89R (458) | N90D (459) | N90E (460) |
| N90K (461) | N90Q (462) | N90R (463) | N90S (464) | N90T (465) |
| N90C (129) | V91D (466) | V91E (467) | V91K (468) | V91N (469) |
| V91Q (470) | V91R (471) | V91S (472) | V91T (473) | V91C (131) |
| Y92H (184) | Y92I (185) | Q94D (474) | Q94E (475) | Q94K (476) |
| Q94N (477) | Q94R (478) | Q94S (479) | Q94T (480) | Q94C (656) |
| I95D (481) | I95E (482) | I95K (483) | I95N (484) | I95Q (485) |
| I95R (486) | I95S (487) | I95T (488) | H97D (489) | H97E (490) |
| H97K (491) | H97N (492) | H97Q (493) | H97R (494) | H97S (495) |
| H97T (496) | H97C (657) | L98D (497) | L98E (498) | L98K (499) |
| L98N (500) | L98Q (501) | L98R (502) | L98S (503) | L98T (504) |
| L98C (658) | K99Q (186) | K99T (187) | K99S (188) | K99H (189) |
| V101D (505) | V101E (506) | V101K (507) | V101N (508) | V101Q (509) |
| V101R (510) | V101S (511) | V101T 512) | V101C (659) | E103Q (190) |
| E103H (191) | E104Q (192) | E104H (193) | K105Q (194) | K105T (195) |
| K105S (196) | K105H (197) | E107Q (198) | E107H (199) | K108Q (200) |
| K108T (201) | K108S (202) | K108H (203) | E109H (205) | E109Q (204) |
| D110Q (206) | D110H (207) | D110G (208) | F111I (209) | F111V (210) |
| R113H (211) | R113Q (212) | L116V (213) | L116I (214) | L116T (215) |
| L116Q (216) | L116H (217) | L116A (218) | L120V (219) | L120I (220) |
| L120T (221) | L120Q (222) | L120H (223) | L120A (224) | K123Q (225) |
| K123T (226) | K123S (227) | K123H (228) | R124H (229) | R124Q (230) |
| R128H (231) | R128Q (232) | L130V (233) | L130I (234) | L130T (235) |
| L130Q (236) | L130H (237) | L130A (238) | K134Q (239) | K134T (240) |
| K134S (241) | K134H (242) | K136Q (243) | K136T (244) | K136S (245) |
| K136H (246) | E137Q (247) | E137H (248) | Y138H (253) | Y138I (254) |
| R152H (255) | R152Q (256) | Y155H (257) | Y155I (258) | R159H (259) |
| R159Q (260) | Y163H (249) | Y163I (250) | R165H (251) | R165Q (252) |

[0364] Provided herein are modified IFN-β polypeptides exhibiting increased protein stability compared to an unmodified IFN-β polypeptide, where the modified IFN-β polypeptide contains one or more amino acid modifications corresponding to any one or more modification of Y3I, Y3H, L6I, L6V, L6H, L6A, R11D, Q18H, Q18S, Q18T, Q18N, K19N, L20I, L20V, L20H, L20A, L21I, L21V, L21T, L21Q, L21H, L21A, Q23H, Q23S, Q23T, Q23N, L24I, L24V, L24T, L24Q, L24H, L24A, E29N, K33N, D34N, D34Q, D34G, F38I, F38V, D39N, P41A, P41S, E42N, E43K, E43Q, E43H, E43N, K45D, K45N, Q48H, Q48S, Q48T, Q48N, Q49H, Q49S, Q49T, Q49N, F50I, F50V, Q51H, Q51S, Q51T, Q51N, K52D, K52N, E53R, E53Q, E53H, E53N, D54G, L57I, L57V, L57T, L57Q, L57H, L57A, Y60H, Y60I, E61K, E61Q, E61H, E61N, M62I, M62V, M62T, M62Q, M62H, M62A, L63I, L63V, L63T, L63Q, L63H, L63A, Q64H, Q64S, Q64T, Q64N, F70I, F70V, Q72H, Q72S, Q72T, Q72N, D73N, W79H, W79S, E81K, E81N, E85K, E85N, L87I, L87V, L87H, L87A, L88I, L88V, L88T, L88Q, L88H, L88A, L98I, L98V, L98H, L98A, K99N, L102I, L102V, L102T, L102Q, L102H, L102A, E103K, E103N, E104R, E104N, K105D, K105N, L106I, L106V, L106T, L106Q, L106H, L106A, E107R, E107N, K108D, K108N, E109R, E109N, D110K, D110N, R113E, K115D, K115Q, K115N, K115S, K115H, M117I, M117V, M117T, M117Q, M117A, L122I, L122V, L122T, L122Q, L122H, L122A, K123N, R124D, R124E, Y125H, Y125I, Y126H, Y126I, Y132H, Y132I, L133I, L133V, L133T, L133Q, L133H, L133A, K134N, K136N, E137N, W143H, W143S, R147H, R147Q, E149Q, E149H, E149N, L151I, L151V, L151T, L151Q, L151H, L151A, R152D, F154I, F154V, F156I, F156V, L160I, L160V, L160T, L160Q, L160H, L160A, L164I, L164V, L164T, L164Q, L164H, L164A, and R165D of a mature IFN-β polypeptide set forth in SEQ ID NO:1. Generally, the modified IFN-β retains one or more activities of the unmodified IFN-β. In some examples, the modification is in an unmodified IFN-β polypeptide having a sequence of amino acids set forth in SEQ ID NO:1 or SEQ ID NO:3. Also provided herein is a modified IFN-β exhibiting increased protein stability as set forth above, containing a further modification compared to an unmodified IFN-β polypeptide. The further modification can be one or more replacement(s) at an amino acid position corresponding to any of positions 1, 5, 6, 8, 9, 10, 11, 12, 13, 14, 15, 16, 17, 19, 20, 22, 23, 24, 25, 27, 28, 29, 30, 32, 33, 35, 36, 39, 42, 45, 47, 52, 67, 71, 73, 78, 79, 80, 81, 82, 83, 85, 86, 87, 89, 90, 91, 92, 94, 95, 97, 98, 99, 101, 103, 104, 105, 107, 108, 109, 110, 111, 113, 116, 123, 124, 128, 130, 134, 136, 137, 138, 152, 155, 159, 163, and 165. Amino acid replacement or replacements can occur at one or more positions corresponding to amino acid residues positions selected from among M1, L5, L6, F8, L9, Q10, R11, S12, S13, N14, F15, Q16, C17, K19, L20, W22, Q23, L24, N25, R27, L28, E29, Y30, L32, K33, R35, M36, D39, E42, K45, L47, K52, F67, R71, D73, G78, W79, N80, E81, T82, I83, E85, N86, L87, A89, N90, V91, Y92, Q94, I95, H97, L98, K99, V101, E103, E104, K105, E107, K108, E109, D110, F111, R113, L116, K123, R124, R128, L130, K134, K136, E137, Y138, R152, Y155, R159, Y163, and R165 of a mature IFN-β polypeptide set forth in SEQ ID NO:1. For example, the amino acid replacements of the further modification can be any one or more amino acid modifications set forth in Table 3, such as for example, any one or more amino modification corresponding to M1V, M1I, M1T, M1A, M1Q, M1D, M1E, M1K, M1N, M1R, M1S, M1C, L5V, L5I, L5T, L5Q, L5H, L5A, L5D, L5E, L5K, L5R, L5N, L5S, L6D, L6E, L6K, L6N, L6Q, L6R, L6S, L6T, L6T, L6C, F8I, F8V, F8D, F8E, F8K, F8R, L9V, L9I, L9T, L9Q, L9H, L9A, L9D, L9E, L9K, L9N, L9R, L9S, Q10D, Q10E, Q10K, Q10N, Q10R, Q10S, Q10T, Q10C, R11H, R11Q, S12D, S12E, S12K, S12R, S13D, S13E, S13K, S13N, S13Q, S13R, S13T, S13C, N14D, N14E, N14K, N14Q, N14R, N14S, N14T, F15I, F15V, F15D, F15E, F15K, F15R, Q16D, Q16E, Q16K, Q16N, Q16R, Q16S, Q16T, Q16C, C17D, C17E, C17K, C17N, C17R, C17S, C17T, K19Q, K19T, K19S, K19H, L20N, L20Q, L20R, L20S, L20T, L20D, L20E, L20K, W22S, W22H, W22D, W22E, W22K, W22R, Q23D, Q23E, Q23K, Q23R, L24D, L24E, L24K, L24R, N25H, N25S, N25Q, R27H, R27Q, L28V, L28I, L28T, L28Q, L28H, L28A, E29Q, E29H, Y30H, Y30I, L32V, L32I, L32T, L32Q, L32H, L32A, K33Q, K33T, K33S, K33H, R35H, R35Q, M36V, M36I, M36T, M36Q, M36A, D39Q, D39H, D39G, E42Q, E42H, K45Q, K45T, K45S, K45T, L47V, L47I, L47T, L47Q, L47H, L47A, K52Q, K52T, K52S, K52H, F67I, F67V, R71H, R71Q, D73Q, D73H, D73G, G78D, G78E, G78K, G78R, N80D, N80E, N80K, N80R, E81Q, E81H, T82D, T82E, T82K, T82R, I83D, I83E, I83K, I83R, I83N, 183Q, I83S, I83T, E85Q, E85H, N86D, N86E, N86K, N86R, N86Q, N86S, N86T, L87D, L87E, L87K, L87R, L87N, L87Q, L87S, L87T, A89D, A89E, A89K, A89R, N90D, N90E, N90K, N90Q, N90R, N90S, N90T, N90C, V91D, V91E, V91K, V91N, V91Q, V91R, V91S, V91T, V91C, Y92H, Y92I, Q94D, Q94E, Q94K, Q94N, Q94R, Q94S, Q94T, Q94C, I95D, I95E, I95K, I95N, I95Q, I95R, I95S, I95T, H97D, H97E, H97K, H97N, H97Q, H97R, H97S, H97T, H97C, L98D, L98E, L98K, L98N, L98Q, L98R, L98S, L98T, L98C, K99Q, K99T, K99S, K99H, V101D, V101E, V101K, V101N, V101Q, V101R, V101S, V101T, V101C, E103Q, E103H, E104Q, E104H, K105Q, K105T, K105S, K105H, E107 Q, E107H, K108 Q, K108T, K108S, K108H, E109H, E109Q, D110Q, D110H, D110G, F111I, F111V, R113H, R113Q, L116V, L116I, L116T, L116Q, L116H, L116A, K123Q, K123T, K123S, K123H, R124H, R124Q, R128H, R128Q, L130V, L130I, L130T, L130Q, L130H, L130A, K134Q, K134T, K134S, K134H, K136Q, K136T, K136S, K136H, E137Q, E137H, Y138H, Y138I, R152H, R152Q, Y155H, Y155I, R159H, R159Q, Y163H, Y163I, R165H, and R165Q of a mature IFN-β polypeptide set forth in SEQ ID NO:1.

[0365] In one example, provided herein are modified IFN-β polypeptides exhibiting increased protein stability compared to an unmodified IFN-β polypeptide of SEQ ID NO:1 wherein the modified IFN-β polypeptide contains one or more amino acid modifications corresponding to any one or more of Y3I, Q18N, Q18S, K19N, L20I, L20V, K33N, D34N, K33N, P41A, P41S, E42N, E43N, K45D, K45N, Q48H, Q48S, Q48T, Q49H, Q49S, Q49T, F50I, F50V, Q51H, Q51S, Q51T, Q51N, K52D, K52N, E53N, D54G, L57I, Y60I, E61K, E61H, E61N, Q64H, Q64S, Q64T, F70I, F70V, Q72H, Q72S, E85N, L88I, L88V, L98I, L98V, K99N, E103N, E104N, K105D, K105N, L106I, L106V, E107N, E109N, K115D, K115N, K115S, K115H, K123N, Y125I, Y126I, Y132I, K134N, Y136N, R147H, R147Q, E149H, E149N, L151I, and L154V of a mature IFN-β polypeptide set forth in SEQ ID NO:1. Generally, the modified IFN-β retains one or more activities of the unmodified IFN-β. Also provided are modified IFN-β polypeptides exhibiting increased protein stability compared to an unmodified IFN-β polypeptide of SEQ ID NO:3 wherein the modified IFN-β polypeptide contains one or more amino acid modifications corresponding to any of Y3I, Q18S, Q18N, K19N, L20I, L20V, L21I, L21V, K33N, D34N, K33N, P41A, P41S, E42N, E43N, K45D, K45N, Q48H, Q48S, Q48T, Q49H, Q49S, Q49T, F50I, F50V, Q51H, Q51S, Q51T, Q51N, K52D, K52N, E53N, D54G, L57I, Y60I, E61K, E61H, E61N, M62I, M62V, Q64H, Q64S, Q64T, F70I, F70V, Q72H, Q72S, E85N, L88I, L88V, L98I, L98V, K99N, E103N, E104N, K105D, K105N, L106I, L106V, E107N, E109N, K115D, K115N, K115S, K115H, M117I, M117V, L122I, L122V, K123N, Y125I, Y126I, Y132I, K134N, Y136N, R147H, R147Q, E149H, E149N, L151I, L154V, and L160V of a mature IFN-α polypeptide set forth in SEQ ID NO:1. Generally, the modified IFN-β retains one or more activities of the unmodified IFN-β. Additionally, a modified IFN-β that exhibits increased protein stability as set forth above can contain a further modification. The further modification can be one or more replacement(s) at an amino acid position corresponding to any of positions 1, 3, 5, 6, 8, 9, 10, 11, 12, 13, 14, 15, 16, 17, 18, 19, 20, 22, 23, 24, 25, 27, 28, 29, 30, 32, 33, 34, 35, 36, 38, 39, 42, 45, 47, 48, 49, 52, 53, 57, 60, 61, 62, 63, 64, 67, 71, 72, 73, 78, 79, 80, 81, 82, 83, 85, 86, 87, 88, 89, 90, 91, 92, 94, 95, 97, 98, 99, 101, 102, 103, 104, 105, 106, 107, 108, 109, 110, 111, 113, 115, 116, 117, 120, 122, 123, 124, 125, 126, 128, 130, 132, 133, 134, 136, 137, 138, 143, 149, 151, 152, 154, 155, 156, 159, 160, 163, 164, and 165. Amino acid replacement or replacements can occur at one or more of amino acid positions corresponding to any of positions M1, Y3, L5, L6, F8, L9, Q10, R11, S12, S13, N14, F15, Q16, C17, Q18, K19, L20, W22, Q23, L24, N25, R27, L28, E29, Y30, L32, K33, D34, R35, M36, F38, D39, E42, K45, L47, Q48, Q49, K52, E53, L57, Y60, E61, M62, L63, Q64, F67, R71, Q72, D73, G78, W79, N80, E81, T82, I83, E85, N86, L87, L88, A89, N90, V91, Y92, Q94, I95, H97, L98, K99, V101, L102, E103, E104, K105, L106, E107, K108, E109, D110, F111, R113, K115, L116, M117, L120, L122, K123, R124, Y125, Y126, R128, L130, Y132, L133, K134, K136, E137, Y138, W143, E149, L151, R152, F154, Y155, F156, R159, L160, Y163, L164, and R165 of a mature IFN-β polypeptide set forth in SEQ ID NO:1. For example, the amino acid replacements of the further modification can be any one or more modification of M1C, M1D, M1E, M1K, M1N, M1R, M1S, M1V, M1I, M1T, M1A, M1Q, Y3H, L5V, L5I, L5T, L5Q, L5H, L5A, L5D, L5E, L5K, L5R, L5N, L5S, L6I, L6V, L6H, L6A, L6D, L6E, L6K, L6N, L6Q, L6R, L6S, L6T, L6C, F8I, F8V, F8D, F8E, F8K, F8R, L9V, L9I, L9T, L9Q, L9H, L9A, L9D, L9E, L9K, L9N, L9R, L9S, Q10D, Q10E, Q10K, Q10N, Q10R, Q10S, Q10T, Q10C, R11D, R11H, R11Q, S12D, S12E, S12K, S12R, S13D, S13E, S13K, S13N, S13Q, S13R, S13T, S13C, N14D, N14E, N14K, N14Q, N14R, N14S, N14T, F15D, F15E, F15K, F15R, F15I, F15V, Q16D, Q16E, Q16K, Q16N, Q16R, Q16S, Q16C, Q16T, C17D, C17E, C17K, C17N, C17Q, C17R, C17S, C17T, Q18H, Q18T, K19Q, K19T, K19S, K19H, L20H, L20A, L20N, L20Q, L20R, L20S, L20T, L20D, L20E, L20K, L21I, L21V, L21T, L21Q, L21H, L21A, W22D, W22E, W22K, W22R, W22S, W22H, Q23H, Q23S, Q23T, Q23N, Q23D, Q23E, Q23K, Q23R, L24I, L24V, L24T, L24Q, L24H, L24A, L24D, L24E, L24K, L24R, N25H, N25S, N25Q, R27H, R27Q, L28V, L28I, L28T, L28Q, L28H, L28A, E29N, E29Q, E29H, Y30H, Y30I, L32V, L32I, L32T, L32Q, L32H, L32A, K33Q, K33T, K33S, K33H, D34Q, D34G, R35H, R35Q, M36V, M36I, M36T, M36Q, M36A, F38I, F38V, D39N, D39Q, D39H, D39G, E42Q, E42H, E43K, E43Q, E43H, K45Q, K45T, K45S, K45H, L47V, L47I, L47T, L47Q, L47H, L47A, Q48N, Q49N, K52Q, K52T, K52S, K52H, E53R, E53Q, E53H, L57V, L57T, L57Q, L57H, L57A, Y60H, E61Q, M62I, M62V, M62T, M62Q, M62A, L63V, L63T, L63Q, L63H, L63A, Q64N, F67I, F67V, R71H, R71Q, Q72N, D73N, D73H, D73G, D73Q, G78D, G78E, G78K, G78R, W79H, W79S, W79D, W79E, W79K, W79R, N80D, N80E, N80K, N80R, E81K, E81N, E81Q, E81H, T82D, T82E, T82K, T82R, I83D, I83E, I83K, I83R, I83N, I83Q, I83S, I83T, E85K, E85Q, E85H, N86D, N86E, N86K, N86R, N86Q, N86S, N86T, L87I, L87V, L87H, L87A, L87D, L87E, L87K, L87R, L87N, L87Q, L87S, L87T, L88T, L88Q, L88H, L88A, A89D, A89E, A89K, A89R, N90D, N90E, N90K, N90Q, N90R, N90S, N90T, N90C, V91D, V91E, V91K, V91N, V91Q, V91R, V91S, V91T, V91C, Y92H, Y92I, Q94D, Q94E, Q94K, Q94N, Q94R, Q94S, Q94T, Q94C, I95D, I95E, I95K, I95N, I95Q, I95R, I95S, I95T, H97D, H97E, H97K, H97N, H97Q, H97R, H97S, H97T, H97C, L98H, L98A, L98D, L98E, L98K, L98N, L98Q, L98R, L98S, L98T, L98C, K99Q, K99T, K99S, K99H, V101D, V101E, V101K, V101N, V101Q, V101R, V101S, V101T, V101C, L102I, L102V, L102T, L102Q, L102H, L102A, E103K, E103Q, E103H, E104R, E104Q, E104H, K105Q, K105T, K105S, K105H, L106T, L106Q, L106H, L106A, E107R, E107Q, E107H, K108D, K108N, K108Q, K108T, K108S, K108H, E109R, E109Q, E109H, D110K, D110N, D110Q, D110H, D110G, F111I, F111V, R113E, R113H, R113Q, K115Q, L116V, L116I, L116T, L116Q, L116H, L116A, M117I, M117V, M117T, M117Q, M117Q, M117A, L120V, L120I, L120T, L120Q, L120H, L120A, L122I, L122V, L122T, L122Q, L122H, L122A, K123Q, K123T, K123S, K123H, R124D, R124E, R124H, R124Q, Y125H, Y126H, R128H, R128Q, L130V, L130I, L130T, L130Q, L130H, L130A, Y132H, L133I, L133V, L133T, L133Q, L133H, L133A, K134Q, K134T, K134S, K134H, K136Q, K136T, K136S, K136H, E137N, E137Q, E137H, Y138H, Y138I, W143H, W143S, E149Q, L151V, L151T, L151Q, L151H, L151A, R152D, R152H, R152Q, F154I, Y155H, Y155I, F156I, F156V, R159H, R159Q, L160I, L160V, L160T, L160Q, L160H, L160A, Y163H, Y163I, L164I, L164V, L164T, L164Q, L164H, L164A, R165D, R165Q and R165H. Provided herein are IFN-β candidate LEAD polypeptides exhibiting increased protein stability having a sequence of amino acids set forth in any of SEQ ID NOS: 4-87, 129, 131, 134-512, 519, 520, and 534-659.

[0366] 1. Protease Resistance

[0367] Of interest is a modified IFN-β polypeptide exhibiting increased protein stability manifested as an increased resistance to digestion by proteases. Among modifications of therapeutic proteins are those that increase protection against protease digestion without destroying or eliminating a therapeutic or the therapeutic activity. Such changes are useful for producing longer-lasting therapeutic proteins. The delivery of stable peptide and protein drugs to patients is a major challenge for the pharmaceutical industry. These types of drugs in the human body are constantly eliminated or taken out of circulation by different physiological processes including internalization, glomerular filtration and proteolysis. The latter is often the limiting process affecting the half-life of proteins used as therapeutic agents in per-oral administration and either intravenous or intramuscular injections. Thus, in one aspect, the polypeptides provided herein have been modified to increase resistance to proteolysis, thereby increasing the half-life of the modified polypeptide in vitro (e.g., production, processing, storage, assay, etc.) or in vivo (e.g., serum stability). Thus, the modified polypeptides provided herein are useful as longer-lasting therapeutic proteins.

[0368] Proteases, proteinases or peptidases catalyze the hydrolysis of covalent peptidic bonds. Modified IFN-β polypeptides provided herein exhibit increased resistance to proteolysis by proteases, including those that occur, for example, in body fluids and tissues, such as those that include, but are not limited to, saliva, blood, serum, intestinal, stomach, blood, cell lysates, cells and others. These include proteases of all types, such as, for example, serine proteases, cysteine proteases, aspartyl proteases, and matrix metalloproteinases. Modifications include, but are not limited to, amino acid modifications that confer resistance to one or more proteases including, but not limited to, pepsin, trypsin, chymotrypsin, elastase, aminopeptidase, gelatinase B, gelatinase A, α-chymotrypsin, carboxypeptidase, endoproteinase Arg-C, endoproteinase Asp-N, endoproteinase Glu-C, endoproteinase Lys-C, luminal pepsin, microvillar endopeptidase, dipeptidyl peptidase, enteropeptidase, hydrolase, NS3, factor Xa, Granzyme B, thrombin, plasmin, urokinase, tPA and PSA.

[0369] Modified IFN-β polypeptides provided herein exhibit increased resistance to proteolysis, particularly by enzymes present in serum, blood, the gut, the mouth and other body fluids. Such increase in resistance is manifested as at least 1%, 2%, 3%, 4%, 5%, 6%, 7%, 8%, 9%, 10%, . . . 20%, . . . 30%, . . . 40%, . . . 50%, . . . 60%, . . . , 70%, . . . 80%, . . . 90%, 91%, 92%, 93%, 94%, 95%, 96%, 97%, 98%, 99%, 100%, 200%, 300%, 400%, 500%, or more resistance to proteolysis compared to the unmodified IFN-β polypeptide. Increasing protein stability to proteases (blood, lysate, intestinal, serum, etc.) is contemplated herein to provide a longer in vitro or in vivo half-life for the particular protein molecule and, thus, a reduction in the frequency of necessary administrations to subjects. Typically, the half-life in vitro or in vivo of the modified IFN-β polypeptides provided herein is increased by an amount selected from at least about or at least 1%, at least 5%, at least 10%, at least 20%, at least 30%, at least 40%, at least 50%, at least 60%, at least 70%, at least 80%, at least 90%, at least 100%, at least 150%, at least 200%, at least 250%, at least 300%, at least 350%, at least 400%, at least 450%, at least 500% or more, when compared to the half-life of unmodified or wild-type human IFN-β in either human blood, human serum, in an in vitro preparation or an in vitro mixture containing one or more proteases. In some instances, the half-life of the IFN-β mutants provided herein is increased by an amount, including but not limited to, at least 6 times, 7 times, 8 times, 9 times, 10 times, 20 times, 30 times, 40 times, 50 times, 60 times, 70 times, 80 times, 90 times, 100 times, 200 times, 300 times, 400 times, 500 times, 600 times, 700 times, 800 times, 900 times, 1000 times, or more, when compared to the half-life of native IFN-β in either in vivo (human blood, human serum, saliva, digestive fluid, the intestinal tract, etc.) or an in vitro mixture containing one or more proteases.

[0370] Typically, the modified IFN-β polypeptides provided herein exhibit at least one activity that is substantially unchanged (less than 1%, 5% or 10% changed) compared to the unmodified or wild-type IFN-β. In some examples, the activity is increased compared to the unmodified IFN-β. In other examples, the activity is decreased compared to the unmodified IFN-β polypeptide. Activity includes, for example, anti-viral or anti-proliferative activity, and can be compared to the unmodified polypeptide, such as for example, the mature, wild-type native IFN-β polypeptide (SEQ ID NO:1), the wild-type precursor IFN-β polypeptide (SEQ ID NO: 2), a commercially available IFN-β polypeptide, (e.g., Betaseron, SEQ ID No: 3), or any other IFN-β polypeptide used as the starting material. In one example, activity of modified IFN-β is assessed in an assay measuring the capacity of the modified IFN-β to modulate cell proliferation or anti-viral activity when added to the appropriate cells. Prior to the measurement of the activity, IFN-β molecules can be challenged with proteases (e.g., blood, intestinal, etc.) under one or more in vitro conditions mimicking administered conditions, such as administration in serum, blood, saliva, or digestive tract (in vitro assays), and/or administed to a subject such as a mouse or human (in vivo assays) during different incubation or post-injection times. The activity measured, corresponds then to the residual activity following exposure to proteolytic mixtures.

[0371] a. Serine Proteases

[0372] Serine proteases participate in a range of functions in the body, including blood clotting, inflammation as well as digestive enzymes in both prokaryotes and eukaryotes. Serine proteases are sequence specific. While cascades of protease activations control blood clotting and complement, other proteases are involved in signaling pathways, enzyme activation and degradative functions in different cellular or extracellular compartments.

[0373] Serine proteases include, but are not limited, to chymotrypsin, trypsin, elastase, NS3, factor Xa, Granzyme B, thrombin, trypsin, plasmin, urokinase, tPA and PSA. Chymotrypsin, trypsin and elastase are synthesized by the pancreatic acinar cells, secreted in the small intestine and are responsible for catalyzing the hydrolysis of peptide bonds. All three of these enzymes are similar in structure, as shown through their X-ray structures. Each of these digestive serine proteases targets different regions of the polypeptide chain, based upon the amino acid residues and side chains surrounding the site of cleavage. The active site of serine proteases is shaped as a cleft where the polypeptide substrate binds. Amino acid residues are labeled from N to C term of the polypeptide substrate (Pi, . . . , P3, P2, P1, P1′, P2′, P3′, . . . , Pj) and their respective binding sub-sites (Si, . . . , S3, S2, S1, S1′, S2′, S3′, . . . , Sj). The cleavage is catalyzed between P1 and P1′. Chymotrypsin is responsible for cleaving peptide bonds flanked with bulky hydrophobic amino acid residues. Particular residues include phenylalanine, tryptophan and tyrosine, which fit into a snug hydrophobic pocket. Trypsin is responsible for cleaving peptide bonds flanked with positively charged amino acid residues. Instead of having the hydrophobic pocket of the chymotrypsin, there exists an aspartic acid residue at the back of the pocket. This can then interact with positively charged residues such as arginine and lysine. Elastase is responsible for cleaving peptide bonds flanked with small neutral amino acid residues, such as alanine, glycine and valine. The pocket that is in trypsin and chymotrypsin is now lined with valine and threonine, rendering it a mere depression, which can accommodate these smaller amino acid residues. Serine proteases are ubiquitous in prokaryotes and eukaryotes and serve important and diverse biological functions such as hemostasis, fibrinolysis, complement formation and the digestion of dietary proteins.

[0374] b. Matrix Metalloproteinases

[0375] Matrix metalloproteinases (MMPs) constitute a family of Zn⁺²- and calcium-dependent endopeptidases that degrade components of the extracellular matrix (ECM). MMPs also can process a number of cell-surface cytokines, receptors and other soluble proteins. They are involved in normal tissue remodeling processes such as wound healing, pregnancy and angiogenesis. Under physiological conditions, MMPs are synthesized as inactive precursors (zymogens) and are processed to their active form. Additionally, the enzymes are specifically regulated by endogenous inhibitors called tissue inhibitors of matrix metalloproteinases (TIMPs). The proteolytic activity of MMPs acts as an effector mechanism of tissue remodeling in physiologic and pathologic conditions, and as modulators of inflammation. The excess synthesis and production of these proteins lead to accelerated degradation of the ECM which is associated with a variety of diseases and conditions such as, for example, bone homeostasis, arthritis, cancer, multiple sclerosis and rheumatoid arthritis. In the context of neuroinflammatory diseases, MMPs have been implicated in processes such as (a) blood-brain barrier (BBB) and blood-nerve barrier opening, (b) invasion of neural tissue by blood-derived immune cells, (c) shedding of cytokines and cytokine receptors, and (d) direct cellular damage in diseases of the peripheral and central nervous system (Leppert et al. Brain Res. Rev. 36(2-3): 249-57 (2001); Borkakoti et al. Prog. Biophys. Mol. Biol. 70(1): 73-94 (1998)).

[0376] Members of the MMP family include collagenases, gelatinases, stromelysins, matrilysin, and membrane-bound MMPs. Most MMPs are secreted in the inactive proenzyme form. The secreted proenzyme MMPs can be activated by several proinflammatory agents such as oxidants, proteinases including elastase, plasmin, and trypsin, and other MMPs. In tissues, physiological MMP activators include tissue or plasma proteinases or opportunistic bacterial proteinases. For example, the plasminogen activator/plasmin system, including ubiquitous plasminogen by urokinase (u-Pa) and tissue-type plasminogen activator (t-Pa), is an important activator of pro-MMP in pathological situations. MMP activity can be inhibited by tissue inhibitors of metalloproteinases (TIMPs), by serine proteinase inhibitors (serpins), and by nonspecific proteinase inhibitors, such as α2-macroglobulin. TIMPs inhibit the MMP activity through noncovalent binding of the active zinc-binding sites of MMPs.

[0377] Gelatinase B (MMP-9; type IV collagenase) belongs to a sub-family of MMPs that plays an important role in tissue remodeling in normal and pathological inflammatory processes and is the terminal member of the protease cascade which leads to matrix degradation. It cleaves gelatins and other substrates, such as IFN-β, and is involved in matrix remodeling during embryogenesis, tissue remodeling and development. Gelatinase B is secreted by a variety of leukocytes including neutrophils, macrophages, lymphocytes, and eosinophils. Generally, the expression of gelatinase B is regulated, however, neutrophils store gelatinase B in secretory granules for rapid release. The expression of gelatinase B in cells can be induced by a variety of inflammatory stimuli including interleukin-1β, tumor necrosis factor-α, lymphotoxin, interferon beta, and lipopolysaccharides (LPS), and by other agents stimulating cell migration. For example, gelatinase B is up-regulated in pathological states such as invasion of cancer cells and when leukocytes are released from the bone marrow and migrate toward an inflammatory event. After stimulation by inflammatory cytokines, or upon delivery of bi-directional activation signals following integrin-mediated cell-cell or cell-ECM contact, gelatinase B also can be secreted by lymphocytes and stromal cells.

[0378] Gelatinase B, like other gelatinases and MMPs, is secreted in a latent inactive form and is converted to an active species by other proteolytic enzymes, including other MMPs. For example, activated gelatinase A can activate progelatinase B in a process that is inhibited by TIMP-1 and TIMP-2 (Fridman et al, Cancer Research, 55:2548-2555 (1995). Progelatinase B also can be converted to an active form via an interacting protease cascade involving plasmin and stromelysin-1 (MMP-3). Plasmin, generated by the endogenous plasminogen activator (uPA), is not an efficient activator of progelatinase B. Plasmin is able to generate active stromelysin-1 from an inactive proform and the activated stromelysin-1 is itself a potent activator of gelatinase B (Hahn-Dantona et al., Ann NY Acad. Sci, 878:372-387 (1999). Latent gelatinase B also can be activated by other proteases including cathepsin G, kallikrein, and trypsin or by incubation with p-aminophenylmercuric acetate (APMA).

[0379] Gelatinase B cleaves a variety of substrates including collagen type II, human myelin basis protein, insulin, and interferon beta. The substrate recognition specificity of gelatinase B has been studied using a phage display library of random hexamers (Kridel et al., (2001), J. Biol. Chem. 276:20572-20578) and has been empirically assessed on a variety of substrates (Descamps, F J et al., (2003) FASEB, 17(8):887-9; Van Den Steen et al., (2002) FASEB, 16: 379-389; and Nelissen et al. (2003) Brain 126: 1371-1381). Gelatinase B typically has a preference for hydrophobic residues at the P1′ position (the position before which cleavage occurs), such as for example Leucine (L). Other amino acid residues that have been recognized as preferentially cleaved by gelatinase B include Phenylalanine (F), Glutamic Acid (E), Tyrosine (Y), and Glutamine (Q). In some cases, protein glycosylation can affect gelatinase B cleavage. For example, proteolysis is more pronounced with IFN-β-1b than with IFN-β.

[0380] Cleavage of substrates by gelatinase B can have a regulatory function. For example, cleavage of the neutrophil chemokine IL-8 by truncation of the amino terminal six amino acids potentiates its activity. In addition, gelatinase B cleavage of endothelin-1 facilitates activation of neutrophils and promotes leukocyte-endothelial cell adhesion and subsequent neutrophil trafficking into inflamed tissues. In contrast, cleavage of substrates by gelatinase B can mediate pathological conditions. For example, evidence suggests that cleavage of substrates produces immunodominant peptides which contribute to the generation of autoimmune diseases, such as multiple sclerosis and rheumatoid arthritis. Cleavage of IFN-β by gelatinase B kills its anti-viral activity, and by killing the activity of IFN-β, gelatinase B counteracts the anti-viral and immunotherapeutic effects of the cytokine.

[0381] Excessive production of gelatinase B is linked to tissue damage and degenerative inflammatory disorders (St-Pierre et al. Curr. Drug Targets Inflamm. Allergy 2(3): 206-215 (2003); Opdenakker, G. Verh. K. Acad. Geneeskd. Belg. 59(6): 489-514 (1997)). Proteinases, such as gelatinase B, have been implicated in chronic inflammation and autoimmunity due to cleavage of extracellular structural proteins and generation of proteolytic fragments. The expression of gelatinase B has been associated with a variety of infections, autoimmune diseases and inflammatory diseases, including, for example, multiple sclerosis and rheumatoid arthritis, cancer, bone homeostasis, and inflammatory bowel diseases (Opdenakker and Van Damme, Immunol. Today 15: 103-107 (1994); Opdenakker et al. Trends Immunol. 22: 571-579 (2001); Van den Steen et al., FASEB J. 16: 379-389 (2002)). Gelatinase B is increased in the serum and cerebral spinal fluid (CSF) of multiple sclerosis patients and is disease promoting (Gijbels et al., J. Neuroimmunol. 41: 29-34 (1992)). In multiple sclerosis, gelatinase B contributes to the destruction of the blood-brain barrier (Mun-Bryce and Rosenberg, Am. J. Physiol. 274: R1203-R1211 (1998); Lukes et al., Mol. Neurobiol. 19: 267-284 (1999)), and further regulates the inflammatory response by activating or destroying chemokines and cytokines (Schonbeck et al., J. Immunol. 161: 3340-3346 (1998); Van den Steen et al. Blood 96: 2673-2681 (2000)), by assisting the in vivo migration of leukocytes to sites of inflammation under the influence of chemotactic gradients (D'Haese et al., J. Interferon Cytokine Res. 20: 667-674 (2000)).

[0382] c. Generation of IFN-β Variants by Removal of Proteolytic Sites

[0383] In an example of generating variants exhibiting increased stability by removal of proteolytic sites, IFN-β was modified. The first step in the design of IFN-β mutants resistant to proteolysis includes identifying sites vulnerable to proteolysis along the protein sequence. Based on a list of selected blood, intestinal or any other type of proteases considered (see e.g., Table 4), an exemplary list of amino acids or sequence of amino acids in IFN-β that can be targeted by those proteases was first determined in silico. The protease targets (amino acids or sequence of amino acids) are named in silico HITs (is-HITs). Since protease mixtures in the body are quite complex in composition, it can be expected that the majority of the residues in a given protein sequence can be targeted for proteolysis.

[0384] The second step in the design of IFN-β mutants that are resistant to proteolysis includes identifying the appropriate replacing amino acids such that the replacement of the natural amino acid in IFN-β at each is-HIT produces a protein that (i) becomes resistant to proteolysis; and (ii) elicits a level of activity at least comparable to the unmodified or wildtype IFN-β polypeptide. The choice of the replacing amino acids must consider the broad specificity of certain proteases and the need to preserve the physiochemical properties, such as for example hydrophobicity, charge and polarity, of essential (e.g., catalytic, binding, etc.) residues in IFN-β,

[0385] Point Accepted Mutation (PAM; Dayhoff et al., 1978) can be used as part of the 2D scanning approach. PAM values, originally developed to produce alignments between protein sequences, are available in the form of probability matrices that reflect an evolutionary distance between amino acids. Conservative substitutions of a residue in a reference sequence are those substitutions that are physically and functionally similar to the corresponding reference residues, i.e., that have a similar size, shape, electric charge, and/or chemical properties, including the ability to form covalent or hydrogen bonds and other such interactions. Conservative substitutions show the highest scores fitting with the PAM matrix criteria in the form of accepted point mutations. The PAM250 matrix is used in the frame of 2D-scanning to identify candidate replacing amino acids for the is-HITs in order to generate conservative mutations without affecting protein function. Typically, at least the two amino acids with the highest values in PAM250 matrix corresponding to conservative substitutions or accepted point mutations were chosen for replacement at each is-HIT. In most cases, the replacement of amino acids by cysteine residues is explicitly avoided since this change potentially leads to the formation of intermolecular disulfide bonds.

[0386] Briefly, using the algorithm PROTEOL (on-line at infobiogen.fr and at bioinfo.hku.hk/services/analyseq/cgi-bin/proteol_in.pl), a list of residues along the IFN-β protein of 166 amino acids (SEQ ID NO:1), which can be recognized as substrate for proteases (blood, intestinal, etc.) was established. The algorithm generates a proteolytic digestion map based on a list of proteases, the proteolytic specificity of the proteases and the polypeptide amino acid sequence that is entered. Table 4 provides a non-limiting list of exemplary proteases for which an is-HIT target amino acid can be identified depending on the known substrate specificity of the protease. Modification of IFN-β to confer resistance to other proteases including serine, cysteine, metalloproteases, and aspartyl proteases also is contemplated, based on the known substrate specificity of the protease. For example, modifications to confer resistance of IFN-β to any one or more proteases of pepsin, trypsin, chymotrypsin, elastase, aminopeptidase, gelatinase B, gelatinase A, α-chymotrypsin, carboxypeptidase, endoproteinase Arg-C, endoproteinase Asp-N, endoproteinase Glu-C, endoproteinase Lys-C, luminal pepsin, microvillar endopeptidase, dipeptidyl peptidase, enteropeptidase, hydrolase, NS3, factor Xa, Granzyme B, thrombin, plasmin, urokinase, tPA and PSA also is contemplated.

TABLE 4

| | Amino Acid | Protease or chemical |
|---|---|---|
| Abbreviation | Position | Treatment |
| AspN | D | Endoproteinase Asp-N |
| Chymo | (F, W, Y, M, L)˜P | Chymotrypsin |
| Clos | R | Clostripain |
| CnBr | M | Cyanogen Bromide |
| IBzO | W | IodosoBenzoate |
| Myxo | K | Myxobacter |
| NH₂OH | N G | Hydroxylamine |
| pH2.5 | D P | pH 2.5 |
| ProEn | P | Proline Endopeptidase |
| Staph | E | Staphylococcal Protease |
| Tryp | (K, R)˜P | Trypsin |
| TrypK | K˜P | Trypsin (Arg blocked) |
| TrypR | R˜P | Trypsin (Lys blocked) |

[0387] Table 4 shows the in silico identification of exemplary amino acid positions that are targets for proteolysis using selected proteases and chemical treatment.

[0388] d. Modified IFN-β Polypeptides Exhibiting Increased Protease Resistance

[0389] Using the methods described herein, is-HIT positions can be identified that, upon modification, result in a polypeptide that exhibits increased protein stability as manifested by increased resistance to proteases compared to an unmodified IFN-β polypeptide. Generally, the modified IFN-β polypeptide retains one or more activities, such as anti-viral activity, of the unmodified IFN-β. In one example, modifications are in an unmodified IFN-β having a sequence of amino acids set forth in SEQ ID NO:1 or 3. Using the methods described herein, the following is-HIT positions were identified to eliminate protease sensitive sites and increase protein stability of IFN-β: 3, 18, 21, 34, 38, 41, 43, 48, 49, 50, 51, 53, 54, 57, 60, 61, 62, 63, 64, 70, 72, 88, 102, 106, 115, 117, 122, 125, 126, 132, 133, 143, 147, 149, 151, 154, 156, 160 and 164. Amino acid replacement or replacements can be at any one or more position corresponding to any of the following positions: Y3, Q18, L21, D34, F38, P41, E43, Q48, Q49, F50, Q51, E53, D54, L57, Y60, E61, M62, L63, Q64, F70, Q72, L88, L102, L106, K115, M117, L122, Y125, Y126, Y132, L133, W143, R147, E149, L151, F154, F156, L160 and L164 of a mature IFN-β polypeptide set forth in SEQ ID NO:1. In a particular embodiment, the amino acid replacement or replacements rendering the modified polypeptide more resistant to proteolysis is (are) replacing Y by H or I; replacing L by I, V, H, A, T, or Q; replacing M by I, T, Q, H, A or V; replacing F by I or V; replacing D by G, N or Q; replacing E by Q, H or N; replacing P by A or S; replacing W by H or S; replacing K by Q, S, H or N; replacing Q by H, S, T or N; and replacing R by H or Q. Table 5 provides non-limiting examples of amino acid replacements, corresponding to amino acid positions of a mature IFN-β polypeptide, that increase resistance to proteolysis and, thereby, protein stability. Other non-limiting amino acid modifications that exhibit increased resistance to proteolysis compared to an unmodified IFN-β polypeptide include any one or more amino acid modifications set forth in Table 6 and disclosed in published U.S. Application No. US-2004-0132977-A1. In Tables 5 and 6 below, the sequence identifier (SEQ ID No.) is in parenthesis next to each substitution.

TABLE 5
IFN-β Mutations to Increase Resistance to Proteolysis

| | | | | |
|---|---|---|---|---|
| Y3H (4) | Y3I (5) | L6I (6) | L6V (7) | L20I (8) |
| L20V (9) | L21I (10) | L21V (11) | L24I (12) | L24V (13) |
| D34N (14) | D34Q (15) | F38I (16) | F38V (17) | P41A (18) |
| P41S (19) | E43Q (20 | E43H (21) | E43N (22) | F50I (23) |
| F50V (24) | E53Q (25) | E53H (26) | E53N (27) | D54N (28) |
| D54Q (29) | L57I (30 | L57V (31) | Y60H (32) | Y60I (33) |
| E61Q (34) | E61H (35) | E61N (36) | M62I (37) | M62V (38) |
| L63I (39) | L63V (40) | F70I (41) | F70V (42) | W79H (43) |
| W79S (44) | L87I (45) | L87V (46) | L88I (47) | L88V (48) |
| L98I (49) | L98V (50) | L102I (51) | L102V (52) | L106I (53) |
| L106V (54) | K115N (55) | K115Q (56) | M117I (57) | M117V (58) |
| L122I (59) | L122V (60) | Y125H (61) | Y125I (62) | Y126H (63) |
| Y126I (64) | Y132H (65) | Y132I (66) | L133I (67) | L133V (68) |
| W143H (71) | W143S (72) | R147H (73) | R147Q (74) | E149Q (75) |
| E149H (76) | E149N (77) | L151I (78) | L151V (79) | F154I (80) |
| F154V (81) | F156I (82) | F156V (83) | L160I (84) | L160V (85) |
| L164I (86) | L164V (87) | L6H (534) | L6A (535) | L20H (537) |
| L20A (538) | L21T (539) | L21Q (540) | L21H (541) | L21A (542) |
| L24T (543) | L24Q (544) | L24H (545) | L24A (546) | D34G (549) |
| D54G (554) | L57T (555) | L57Q (556) | L57H (557) | L57A (558) |
| M62T (559) | M62Q (560) | M62A (561) | L63T (562) | L63Q (563) |
| L63H (564) | L63A (565) | L87H (569) | L87A (570) | L88T (571) |
| L88Q (572) | L88H (573) | L88A (574) | L98H (575) | L98A (576) |
| L102T (578) | L102Q (579) | L102H (580) | L102A (581) | L106T (585) |
| L106Q (586) | L106H (587) | L106A (588) | K115S (593) | K115H (594) |
| M117T | M117Q | M117A (598) | L122T (599) | L122Q (600) |
| (596) | (597) | | | |
| L122H (601) | L122A (602) | L133T (604) | L133Q (605) | L133H (606) |
| L133A (607) | L151T (611) | L151Q (612) | L151H (613) | L151A (614) |
| L160T (615) | L160Q (616) | L160H (617) | L160A (618) | L164T (619) |
| L164Q (620) | L164H (621) | L164A (622) | K19N (536) | E29N (547) |
| K33N (548) | D39N (550) | E42N (551) | K45N (552) | K52N (553) |
| D73N (566) | E81N (567) | E85N (568) | K99N (577) | E103N (582) |
| E104N (583) | K105N (584) | E107N (589) | K108N (590) | E109N (591) |
| D110N (592) | K123N (603) | K134N (608) | K136N (609) | E137N (610) |
| Q18H (623) | Q18S (624) | Q18T (625) | Q18N (626) | Q23H (627) |
| Q23S (628) | Q23T (629) | Q23N (630) | Q48H (631) | Q48S (632) |
| Q48T (633) | Q48N (634) | Q49H (635) | Q49S (636) | Q49T (637) |
| Q49N (638) | Q51H (639) | Q51S (640) | Q51T (641) | Q51N (642) |
| Q64H (643) | Q64S (644) | Q64T (645) | Q64N (646) | Q72H (647) |
| Q72S (648) | Q72T (649) | Q72N (650) | | |

[0390] TABLE 6
Additional IFN-β Mutations to Increase Resistance to Proteolysis

| | | | | |
|---|---|---|---|---|
| M1V (262) | M1I (263) | M1T (264) | M1A (265) | M1Q (261) |
| M1D (322) | M1E (323) | M1K (324) | M1N (325) | M1R (326) |
| M1S (327) | M1C (651) | L5V (266) | L5I (267) | L5T (268) |
| L5Q (269) | L5H (270) | L5A (271) | L5D (328) | L5E (329) |
| L5K (330) | L5R (331) | L5N (332) | L5S (333) | L6D (334) |
| L6E (335) | L6K (336) | L6N (337) | L6Q (338) | L6R (339) |
| L6S (340) | L6T (341) | L6C (652) | F8I (272) | F8V (273) |
| F8D (342) | F8E (343) | F8K (344) | F8R (345) | L9V (274) |
| L9I (275) | L9T (276) | L9Q (277) | L9H (278) | L9A (279) |
| L9D (346) | L9E (347) | L9K (348) | L9N (349) | L9R (350) |
| L9S (351) | Q10D (352) | Q10E (353) | Q10K (354) | Q10N (355) |
| Q10R (356) | Q10S (357) | Q10T (358) | Q10C (653) | R11H (280) |
| R11Q (281) | S12D (359) | S12E (360) | S12K (361) | S12R (362) |
| S13D (363) | S13E (364) | S13K (365) | S13N (366) | S13Q (367) |
| S13R (368) | S13T (369) | S13C (654) | N14D (370) | N14E (371) |
| N14K (372) | N14Q (373) | N14R (374) | N14S (375) | N14T (376) |
| F15I (282) | F15V (283) | F15D (377) | F15E (378) | F15K (379) |
| F15R (380) | Q16D (381) | Q16E (382) | Q16K (383) | Q16N (384) |
| Q16R (385) | Q16S (386) | Q16T (387) | Q16C (655) | C17D (388) |
| C17E (389) | C17K (390) | C17N (391) | C17Q (392) | C17R (393) |
| C17S (394) | C17T (395) | K19Q (284) | K19T (285) | K19S (286) |
| K19H (287) | L20N (396) | L20Q (402) | L20R (398) | L20S (399) |
| L20T (400) | L20D (401) | L20E (397) | L20K (403) | W22S (288) |
| W22H (289) | W22D (404) | W22E (405) | W22K (406) | W22R (407) |
| Q23D (408) | Q23E (409) | Q23K (410) | Q23R (411) | L24D (412) |
| L24E (413) | L24K (414) | L24R (415) | N25H (290) | N25S (291) |
| N25Q (292) | R27H (293) | R27Q (294) | L28V (295) | L28I (296) |
| L28T (297) | L28Q (298) | L28H (299) | L28A (300) | E29Q (301) |
| E29H (302) | Y30H (303) | Y30I (304) | L32V (305) | L32I (306) |
| L32T (307) | L32Q (308) | L32H (309) | L32A (310) | K33Q (311) |
| K33T (312) | K33S (313) | K33H (314) | R35H (315) | R35Q (316) |
| M36V (317) | M36I (318) | M36T (319) | M36Q (320) | M36A (321) |
| D39Q (154) | D39H (155) | D39G (156) | E42Q (157) | E42H (158) |
| K45Q (159) | K45T (160) | K45S (161) | K45H (162) | L47V (163) |
| L47I (164) | L47T (165) | L47Q (166) | L47H (167) | L47A (168) |
| K52Q (169) | K52T (170) | K52S (171) | K52H (172) | F67I (173) |
| F67V (174) | R71H (175) | R71Q (176) | D73Q (177) | D73H (178) |
| D73G (179) | G78D (416) | G78E (417) | G78K (418) | G78R (419) |
| W79D (420) | W79E (421) | W79K (422) | W79R (423) | N80D (424) |
| N80E (425) | N80K (426) | N80R (427) | E81Q (180) | E81H (181) |
| T82D (428) | T82E (429) | T82K (430) | T82R (431) | I83D (432) |
| I83E (433) | I83K (434) | I83R (435) | I83N (436) | I83Q (437) |
| I83S (438) | I83T (439) | E85Q (182) | E85H (183) | N86D (440) |
| N86E (441) | N86K (442) | N86R (443) | N86Q (444) | N86S (445) |
| N86T (446) | L87D (447) | L87E (448) | L87K (449) | L87R (450) |
| L87N (451) | L87Q (452) | L87S (453) | L87T (454) | A89D (455) |
| A89E (456) | A89K (457) | A89R (458) | N90D (459) | N90E (460) |
| N90K (461) | N90Q (462) | N90R (463) | N90S (464) | N90T (465) |
| N90C (129) | V91D (466) | V91E (467) | V91K (468) | V91N (469) |
| V91Q (470) | V91R (471) | V91S (472) | V91T (473) | V91C (131) |
| Y92H (184) | Y92I (185) | Q94D (474) | Q94E (475) | Q94K (476) |
| Q94N (477) | Q94R (478) | Q94S (479) | Q94T (480) | Q94C (656) |
| I95D (481) | I95E (482) | I95K (483) | I95N (484) | I95Q (485) |
| I95R (486) | I95S (487) | I95T (488) | H97D (489) | H97E (490) |
| H97K (491) | H97N (492) | H97Q (493) | H97R (494) | H97S (495) |
| H97T (496) | H97C (657) | L98D (497) | L98E (498) | L98K (499) |
| L98N (500) | L98Q (501) | L98R (502) | L98S (503) | L98T (504) |
| L98C (658) | K99Q (186) | K99T (187) | K99S (188) | K99H (189) |
| V101D (505) | V101E (506) | V101K (507) | V101N (508) | V101Q (509) |
| V101R (510) | V101S (511) | V101T 512) | V101C (659) | E103Q (190) |
| E103H (191) | E104Q (192) | E104H (193) | K105Q (194) | K105T (195) |
| K105S (196) | K105H (197) | E107Q (198) | E107H (199) | K108Q (200) |
| K108T (201) | K108S (202) | K108H (203) | E109H (205) | E109Q (204) |
| D110Q (206) | D110H (207) | D110G (208) | F111I (209) | F111V (210) |
| R113H (211) | R113Q (212) | L116V (213) | L116I (214) | L116T (215) |
| L116Q (216) | L116H (217) | L116A (218) | L120V (219) | L120I (220) |
| L120T (221) | L120Q (222) | L120H (223) | L120A (224) | K123Q (225) |
| K123T (226) | K123S (227) | K123H (228) | R124H (229) | R124Q (230) |
| R128H (231) | R128Q (232) | L130V (233) | L130I (234) | L130T (235) |
| L130Q (236) | L130H (237) | L130A (238) | K134Q (239) | K134T (240) |
| K134S (241) | K134H (242) | K136Q (243) | K136T (244) | K136S (245) |
| K136H (246) | E137Q (247) | E137H (248) | Y138H (253) | Y138I (254) |
| R152H (255) | R152Q (256) | Y155H (257) | Y155I (258) | R159H (259) |
| R159Q (260) | Y163H (249) | Y163I (250) | R165H (251) | R165Q (252) |

[0391] A modified IFN-β polypeptide provided herein that exhibits increased protease resistance can contain one or more amino acid modifications corresponding to any one or more modifications of Y3H, Y3I, L6I, L6V, L6H, L6A, Q18H, Q18S, Q18T, Q18N, K19N, L20I, L20V, L20H, L20A, L21I, L21V, L21T, L21Q, L21H, L21A, Q23H, Q23S, Q23T, Q23N, L24I, L24V, L24T, L24Q, L24H, L24A, E29N, K33N, D34N, D34Q, D34G, F38I, F38V, D39N, P41A, P41S, E42N, E43Q, E43H, E43N, K45N, Q48H, Q48S, Q48T, Q48N, Q49H, Q49S, Q49T, Q49N, F50I, F50V, Q51H, Q51S, Q51T, Q51N, K52N, E53Q, E53H, E53N, D54N, D54Q, D54G, L57I, L57V, L57T, L57Q, L57H, L57A, Y60H, Y60I, E61Q, E61H, E61N, M62I, M62V, M62T, M62Q, M62A, L63I, L63V, L63T, L63Q, L63H, L63A, Q64H, Q64S, Q64T, Q64N, F70I, F70V, Q72H, Q72S, Q72T, Q72N, D73N, W79H, W79S, E81N, E85N, L87I, L87V, L87H, L87A, L88I, L88V, L88T, L88Q, L88H, L88A, L98I, L98V, L98H, L98A, K99N, L102I, L102V, L102T, L102Q, L102H, L102A, E103N, E104N, K105N, L106I, L106V, L106T, L106Q, L106H, L106A, E107N, K108N, E109N, D110N, K115N, K115Q, K115S, K115H, M117I, M117V, M117T, M117Q, M117A, L122I, L122V, L122T, L122Q, L122H, L122A, K123N, Y125H, Y125I, Y126H, Y126I, Y132H, Y132I, L133I, L133V, L133T, L133Q, L133H, L133A, K134N, K136N, E137N, W143H, W143S, R147H, R147Q, E149Q, E149H, E149N, L151I, L151V, L151T, L151Q, L151H, L151A, F154I, F154V, F156I, F156V, L160I, L160V, L160T, L160Q, L160H, L160A, L164I, L164V, L164T, L164Q, L164H, and L164A of a mature IFN-β polypeptide set forth in SEQ ID NO:1. In some examples, the modifications are in an unmodified IFN-β polypeptide, such as an IFN-β having a sequence of amino acids set forth in SEQ ID NO:1 or SEQ ID NO:3. Exemplary modified IFN-β LEAD candidate polypeptides are set forth in any one of SEQ ID NOS: 4-68, 71-87, 534, 535, 536-594, and 596-650. Additionally, a modified IFN-β as set forth above can contain a further modification compared to an unmodified IFN-β polypeptide. Generally, the resulting modified IFN-β polypeptide retains one or more activities of the unmodified IFN-β. The further modification can be one or more amino acid replacement(s) at an amino acid position corresponding to any of positions 1, 5, 6, 8, 9, 10, 11, 12, 13, 14, 15, 16, 17, 19, 20, 22, 23, 24, 25, 27, 28, 29, 30, 32, 33, 35, 36, 39, 42, 45, 47, 52, 67, 71, 73, 78, 79, 80, 81, 82, 83, 85, 86, 87, 89, 90, 91, 92, 94, 95, 97, 98, 99, 101, 103, 104, 105, 107, 108, 109, 110, 111, 113, 116, 123, 124, 128, 130, 134, 136, 137, 138, 152, 155, 159, 163, and 165. Amino acid replacement or replacements can occur at one or more of amino acid residues corresponding to any of positions M1, L5, L6, F8, L9, Q10, R11, S12, S13, N14, F15, Q16, C17, K19, L20, W22, Q23, L24, N25, R27, L28, E29, Y30, L32, K33, R35, M36, D39, E42, K45, L47, K52, F67, R71, D73, G78, W79, N80, E81, T82, I83, E85, N86, L87, A89, N90, V91, Y92, Q94, I95, H97, L98, K99, V101, E103, E104, K105, E107, K108, E109, D110, F111, R113, L116, K123, R124, R128, L130, K134, K136, E137, Y138, R152, Y155, R159, Y163, and R165 of a mature IFN-β polypeptide set forth in SEQ ID NO:1. For example, the amino acid replacements of the further modification can include a modification, set forth in Table 6 above, such as for example, any one or more amino acid modifications corresponding to any of M1V, M1I, M1T, M1A, M1Q, M1D, M1E, M1K, M1N, M1R, M1S, M1C, L5V, L5I, L5T, L5Q, L5H, L5A, L5D, L5E, L5K, L5R, L5N, L5S, L6D, L6E, L6K, L6N, L6Q, L6R, L6S, L6T, L6T, L6C, F8I, F8V, F8D, F8E, F8K, F8R, L9V, L9I, L9T, L9Q, L9H, L9A, L9D, L9E, L9K, L9N, L9R, L9S, Q10D, Q10E, Q10K, Q10N, Q10R, Q10S, Q10T, Q10C, R11H, R11Q, S12D, S12E, S12K, S12R, S13D, S13E, S13K, S13N, S13Q, S13R, S13T, S13C, N14D, N14E, N14K, N14Q, N14R, N14S, N14T, F15I, F15V, F15D, F15E, F15K, F15R, Q16D, Q16E, Q16K, Q16N, Q16R, Q16S, Q16T, Q16C, C17D, C17E, C17K, C17N, C17R, C17S, C17T, K19Q, K19T, K19S, K19H, L20N, L20Q, L20R, L20S, L20T, L20D, L20E, L20K, W22S, W22H, W22D, W22E, W22K, W22R, Q23D, Q23E, Q23K, Q23R, L24D, L24E, L24K, L24R, N25H, N25S, N25Q, R27H, R27Q, L28V, L28I, L28T, L28Q, L28H, L28A, E29Q, E29H, Y30H, Y30I, L32V, L32I, L32T, L32Q, L32H, L32A, K33Q, K33T, K33S, K33H, R35H, R35Q, M36V, M36I, M36T, M36Q, M36A, D39Q, D39H, D39G, E42Q, E42H, K45Q, K45T, K45S, K45T, L47V, L47I, L47T, L47Q, L47H, L47A, K52Q, K52T, K52S, K52H, F67I, F67V, R71H, R71Q, D73Q, D73H, D73G, G78D, G78E, G78K, G78R, N80D, N80E, N80K, N80R, E81Q, E81H, T82D, T82E, T82K, T82R, I83D, I83E, I83K, I83R, I83N, I83Q, I83S, I83T, E85 Q, E85H, N86D, N86E, N86K, N86R, N86Q, N86S, N86T, L87D, L87E, L87K, L87R, L87N, L87Q, L87S, L87T, A89D, A89E, A89K, A89R, N90D, N90E, N90K, N90Q, N90R, N90S, N90T, N90C, V91D, V91E, V91K, V91N, V91Q, V91R, V91S, V91T, V91C, Y92H, Y92I, Q94D, Q94E, Q94K, Q94N, Q94R, Q94S, Q94T, Q94C, I95D, I95E, I95K, I95N, I95Q, I95R, I95S, I95T, H97D, H97E, H97K, H97N, H97Q, H97R, H97S, H97T, H97C, L98D, L98E, L98K, L98N, L98Q, L98R, L98S, L98T, L98C, K99Q, K99T, K99S, K99H, V101D, V101E, V101K, V101N, V101Q, V101R, V101S, V101T, V101C, E103Q, E103H, E104Q, E104H, K105Q, K105T, K105S, K105H, E107Q, E107H, K108 Q, K108T, K108S, K108H, E109H, E109Q, D110Q, D110H, D110G, F111I, F111V, R113H, R113Q, L116V, L116I, L116T, L116Q, L116H, L116A, K123Q, K123T, K123S, K123H, R124H, R124Q, R128H, R128Q, L130V, L130I, L130T, L130Q, L130H, L130A, K134Q, K134T, K134S, K134H, K136Q, K136T, K136S, K136H, E137Q, E137H, Y138H, Y138I, R152H, R152Q, Y155H, Y155I, R159H, R159Q, Y163H, Y163I, R165H, and R165Q of a mature IFN-β polypeptide set forth in SEQ ID NO:1.

[0392] In one example, exemplary modified IFN-β polypeptides provided herein exhibiting increased protease resistance can contain one or more amino acid modifications compared to an unmodified IFN-β polypeptide of SEQ ID NO:1, such as for example, any one or more amino acid modifications corresponding to Y3I, K19N, Q18S, Q18N, L20I, L20V, K33N, D34N, P41A, P41S, E42N, E43N, K45N, Q48H, Q48S, Q48T, Q49H, Q49S, Q49T, F50I, F50V, Q51H, Q51S, Q51T, Q51N, K52N, E53N, D54N, D54G, L57I, Y60I, E61H, E61N, L63I, Q64H, Q64S, Q64T, F70I, F70V, Q72H, Q72S, E85N, L88I, L88V, L98I, L98V, K99N, E103N, E104N, K105N, L106I, L106V, E107N, E109N, K115N, K115S, K115H, K115N, K123N, Y125I, Y126I, Y132I, K134N, K136N, R147H, R147Q, E149H, E149N, L151I, and F154V of a mature IFN-β polypeptide set forth in SEQ ID NO:1. Exemplary modified IFN-β candidate LEAD polypeptides are set forth in any one of SEQ ID NOS: 5, 8, 9, 14, 18, 19, 22-24, 27, 28, 30, 33, 35, 36, 39, 41, 42, 47-50, 53-55, 62, 64, 66, 73, 74, 76-78, 81, 536, 548, 551-554, 568, 577, 582-584, 589, 591, 593, 594, 603, 608, 609, 624, 626, 631-633, 635-637, 639-645, 647, and 648. In another example, an IFN-β polypeptide provided herein exhibiting increased protease resistance can contain one or more amino acid modifications compared to an unmodified IFN-β polypeptide having a sequence of amino acids set forth in SEQ ID NO:3, such as for example, any one or more amino acid modifications corresponding to Y3I, K19N, Q18S, Q18N, L20I, L20V, L21I, L21V, K33N, D34N, P41A, P41S, E42N, E43N, K45N, Q48H, Q48S, Q48T, Q49H, Q49S, Q49T, F50I, F50V, Q51H, Q51S, Q51T, Q51N, K52N, E53N, D54N, D54G, L57I, Y60I, E61H, E61N, M62I, M62V, L63I, Q64H, Q64S, Q64T, F70I, F70V, Q72H, Q72S, E85N, L88I, L88V, L98I, L98V, K99N, E103N, E104N, K105N, L106I, L106V, E107N, E109N, K115N, K115S, K115H, K115N, M117I, M117V, L122I, L122V, K123N, Y125I, Y126I, Y132I, K134N, K136N, R147H, R147Q, E149H, E149N, L151I, F154V and L160V of a mature IFN-α polypeptide set forth in SEQ ID NO:1. Additionally, a modified IFN-β containing any one or more modification as set forth above can contain a further modification. Generally, the resulting modified polypeptide exhibits increased protease resistance and retains one or more activities of the unmodified IFN-β. The further modification can be one or more replacement(s) at an amino acid position corresponding to any of positions 1, 3, 5, 6, 8, 9, 10, 11, 12, 13, 14, 15, 16, 17, 18, 19, 20, 21, 22, 23, 24, 25, 27, 28, 29, 30, 32, 33, 34, 35, 36, 38, 39, 42, 43, 45, 47, 48, 49, 52, 53, 54, 57, 60, 61, 62, 63, 64, 67, 71, 72, 73, 78, 79, 80, 81, 82, 83, 85, 86, 87, 88, 89, 90, 91, 92, 94, 95, 97, 98, 99, 101, 102, 103, 104, 105, 106, 107, 108, 109, 110, 111, 113, 115, 116, 117, 122, 123, 124, 125, 126, 128, 130, 132, 133, 134, 136, 137, 138, 143, 149, 151, 152, 155, 156, 159, 160, 163, 164, and 165. Amino acid replacement or replacements can occur at one or more of amino acid positions corresponding to any of positions M1, Y3, L5, L6, F8, L9, Q10, R11, S12, S13, N14, F15, Q16, C17, Q18, K19, L20, L21, W22, Q23, L24, N25, R27, L28, E29, Y30, L32, K33, D34, R35, M36, F38, D39, E42, E43, K45, L47, Q48, Q49, K52, E53, D54, L57, Y60, E61, M62, L63, Q64, F67, R71, Q72, D73, G78, W79, N80, E81, T82, I83, E85, N86, L87, L88, A89, N90, V91, Y92, Q94, I95, H97, L98, K99, V101, L102, E103, E104, K105, L106, E107, K108, E109, D110, F111, R113, K115, L116, M117, L122, K123, R124, Y125, Y126, R128, L130, Y132, L133, K134, K136, E137, Y138, W143, E149, L151, R152, Y155, F156, R159, L160, Y163, L164 and R165 of a mature IFN-β polypeptide set forth in SEQ ID NO:1. For example, the amino acid replacements of the further modification can correspond to any one or more modification of M1V, M1I, M1T, M1A, M1Q, M1D, M1E, M1K, M1N, M1R, M1S, M1C, Y3H, L5V, L5I, L5T, L5Q, L5H, L5A, L5D, L5E, L5K, L5R, L5N, L5S, L6H, L6A, L6I, L6V, L6D, L6E, L6K, L6N, L6Q, L6R, L6S, L6T, L6T, L6C, F8I, F8V, F8D, F8E, F8K, F8R, L9V, L9I, L9T, L9Q, L9H, L9A, L9D, L9E, L9K, L9N, L9R, L9S, Q10D, Q10E, Q10K, Q10N, Q10R, Q10S, Q10T, Q10C, R11H, R11Q, S12D, S12E, S12K, S12R, S13D, S13E, S13K, S13N, S13Q, S13R, S13T, S13C, N14D, N14E, N14K, N14Q, N14R, N14S, N14T, F15I, F15V, F15D, F15E, F15K, F15R, Q16D, Q16E, Q16K, Q16N, Q16R, Q16S, Q16T, Q16C, C17D, C17E, C17K, C17N, C17R, C17S, C17T, Q18H, Q18T, K19Q, K19T, K19S, K19H, L20H, L20A, L20N, L20Q, L20R, L20S, L20T, L20D, L20E, L20K, L21I, L21V, L21T, L21Q, L21H, L21A, W22S, W22H, W22D, W22E, W22K, W22R, Q23H, Q23S, Q23T, Q23N, Q23D, Q23E, Q23K, Q23R, L24T, L24Q, L24H, L24I, L24V, L24D, L24E, L24K, L24R, N25H, N25S, N25Q, R27H, R27Q, L28V, L28I, L28T, L28Q, L28H, L28A, E29N, E29Q, E29H, Y30H, Y30I, L32V, L32I, L32T, L32Q, L32H, L32A, K33Q, K33T, K33S, K33H, D34Q, D34G, R35H, R35Q, M36V, M36I, M36T, M36Q, M36A, F38I, F38V, D39N, D39Q, D39H, D39G, E42Q, E42H, E43Q, E43H, K45Q, K45T, K45S, K45T, L47V, L47I, L47T, L47Q, L47H, L47A, Q48N, Q49N, K52Q, K52T, K52S, K52H, E53Q, E53H, D54Q, L57T, L57Q, L57H, L57A, L57V, Y60H, E61Q, M62I, M62V, M62T, M62Q, M62A, L63T, L63Q, L63H, L63A, L63V, Q64N, F67I, F67V, R71H, R71Q, Q72T, Q72N, D73N, D73Q, D73H, D73G, G78D, G78E, G78K, G78R, W79H, W79S, N80D, N80E, N80K, N80R, E81N, E81Q, E81H, T82D, T82E, T82K, T82R, I83D, I83E, I83K, I83R, I83N, I83Q, I83S, I83T, E85 Q, E85H, N86D, N86E, N86K, N86R, N86Q, N86S, N86T, L87H, L87A, L88T, L88Q, L88H, L88A, L87I, L87V, L87D, L87E, L87K, L87R, L87N, L87Q, L87S, L87T, A89D, A89E, A89K, A89R, N90D, N90E, N90K, N90Q, N90R, N90S, N90T, N90C, V91D, V91E, V91K, V91N, V91Q, V91R, V91S, V91T, V91C, Y92H, Y92I, Q94D, Q94E, Q94K, Q94N, Q94R, Q94S, Q94T, Q94C, I95D, I95E, I95K, I95N, I95Q, I95R, I95S, I95T, H97D, H97E, H97K, H97N, H97Q, H97R, H97S, H97T, H97C, L98H, L98A, L98D, L98E, L98K, L98N, L98Q, L98R, L98S, L98T, L98C, K99Q, K99T, K99S, K99H, V101D, V101E, V101K, V101N, V101Q, V101R, V101S, V101T, V101C, L102T, L102Q, L102H, L102A, L102I, L102V, E103Q, E103H, E104Q, E104H, K105Q, K105T, K105S, K105H, L106T, L106Q, L106H, L106A, E107Q, E107H, K108N, K108Q, K108T, K108S, K108H, E109H, E109Q, D110N, D110Q, D110H, D110G, F111I, F111V, R113H, R113Q, K115Q, L116V, L116I, L116T, L116Q, L116H, L116A, M117I, M117V, M117T, M117Q, M117A, L122I, L122V, L122T, L122Q, L122H, L122A, K123Q, K123T, K123S, K123H, R124H, R124Q, Y125H, Y126H, R128H, R128Q, L130V, L130I, L130T, L130Q, L130H, L130A, L133T, L133Q, L133H, L133A, Y132I, K134Q, K134T, K134S, K134H, K136Q, K136T, K136S, K136H, E137N, E137Q, E137H, Y138H, Y138I, W143H, W143S, E149Q, L151T, L151Q, L151H, L151A, L151V, R152H, R152Q, F154V, F154I, Y155H, Y155I, F156I, F156V, R159H, R159Q, L160V, L160T, L160Q, L160H, L160A, L160I, Y163H, Y163I, L164T, L164Q, L164H, L164A, L164I, L164V, R165H, and R165Q of a mature IFN-β polypeptide set forth in SEQ ID NO:1.

[0393] In another example, an IFN-β polypeptide provided herein exhibiting increased protease resistance can contain any two or more amino acid modifications set forth above compared to an unmodified IFN-β polypeptide, such as for example compared to an unmodified IFN-β polypeptide set forth in SEQ ID NO:1 or 3. For example, an IFN-β polypeptide can contain two or more amino acid modifications at is-HIT positions set forth in Table 5 above, two or more amino acid modifications at is-HIT positions set forth in Table 6 above, or any combination thereof, such as one or more amino acid modifications set forth in Table 5 and one or more amino acid modifications set forth in Table 6. Generally, the resulting IFN-β polypeptide exhibits increased protease resistance and retains one more activities of an unmodified IFN-β polypeptide. Non-limiting examples of IFN-β SuperLead polypeptides containing two or more amino acid modifications and exhibiting increased resistance to proteolysis are described in Example 7 and can include amino acid replacements at amino acid residues corresponding to L5E/Q10D, L5E/K108S, L6Q/L47I, L5D/K108S, L5N/L6E, L5Q/K108S, L5N/Q10D, L6Q/M36I, L5D/N86Q, L5N/K108S, L5D/L6Q, L6E/Q10D, L5Q/N86Q, L6E/K108S, L5D/L47I, L6Q/K108S, L5N/L6Q, L6E/N86Q, L5Q/L6Q, L5D/M36I, L5N/L47I, L6Q/N86Q of a mature IFN-β polypeptide set forth in SEQ ID NO:1. Exemplary modified IFN-β SuperLead polypeptides containing two or more amino acid modifications and exhibiting increased protease resistance have a sequence of amino acids set forth in any one of SEQ ID NOS: 89, 92, 96-98, 102, 104-109, 111, 114, 116, 117, and 120-125.

[0394] i. Modified IFN-β Polypeptides Exhibiting Increased Protease Resistance to Gelatinase B

[0395] Exemplary of modified IFN-β polypeptides exhibiting increased protease resistance are IFN-β polypeptides exhibiting increased resistance to gelatinase B. Non-limiting modifications in an IFN-β polypeptide that confer increased resistance to gelatinase B can be rationally determined based on the known substrate specificity of gelatinase B (see e.g. Descamps, F J et al., (2003) FASEB, 17(8):887-9). For example, based on the cleavage of gelatinase B substrates, the following amino acids were identified as target amino acids: Phenylalanine (F), Leucine (L), Glutamic Acid (E), Tyrosine (Y), and Glutamine (Q). The following is-HIT positions were identified to eliminate gelatinase B sensitive sites and increase protein stability of IFN-β: 3, 5, 6, 8, 9, 10, 15, 16, 18, 20, 21, 23, 24, 28, 29, 30, 32, 38, 42, 43, 47, 48, 49, 50, 51, 53, 57, 60, 61, 63, 64, 67, 70, 72, 81, 85, 87, 88, 92, 94, 98, 102, 103, 104, 106, 107, 109, 111, 116, 120, 125, 126, 130, 132, 133, 137, 138, 149, 151, 154, 156, 160, 163, and 164, corresponding to amino acid positions in a mature IFN-β polypeptide set forth in SEQ ID NO:1. Amino acid modifications can be at any one or more positions corresponding to any of the following positions: Y3, L5, L6, F8, L9, Q10, F15, Q16, Q18, L20, L21, Q23, L24, L28, E29, Y30, L32, F38, E42, E43, L47, Q48, Q49, F50, Q51, E53, L57, Y60, E61, L63, Q64, F67, F70, Q72, E81, E85, L87, L88, Y92, Q94, L98, L102, E103, E104, L106, E107, E109, F111, L116, L120, Y125, Y126, L130, Y132, L133, E137, Y138, E149, L151, F154, F156, L160, Y163, and L164 of a mature IFN-β polypeptide set forth in SEQ ID NO:1. Candidate leads can be obtained by replacement or replacements of amino acids at is-HIT positions such as, but not limited to, amino acid modifications as described for candidate LEADs in Table 5 and in Table 6. Candidate leads can be empirically tested to determine those that confer resistance to gelatinase B, as is described in Example 8 for some non-limiting IFN-β polypeptides. Table 7 provides non-limiting examples of amino acid modifications that increase resistance to proteolysis by gelatinase B and, thereby, protein stability. Generally, a resulting modified IFN-β polypeptide retains one or more activities of a mature or unmodified IFN-β polypeptide. In Table 7 below, the sequence identifier (SEQ ID No.) is in parenthesis next to each substitution.

TABLE 7
IFN-β Mutations to Increase Resistance to Proteolysis by Gelatinase B

| | | | | |
|---|---|---|---|---|
| Y3H (4) | Y3I (5) | L5V (266) | L5I (267) | L5T (268) |
| L5Q (269) | L5H (270) | L5A (271) | L5D (328) | L5E (329) |
| L5K (330) | L5R (331) | L5N (332) | L5S (333) | L6I (6) |
| L6V (7) | L6H (534) | L6A (535) | L6D (334) | L6E (335) |
| L6K (336) | L6N (337) | L6Q (338) | L6R (339) | L6S (340) |
| L6T (341) | L6C (652) | F8I (272) | F8V (273) | F8D (342) |
| F8E (343) | F8K (344) | F8R (345) | L9V (274) | L9I (275) |
| L9T (276) | L9Q (277) | L9H (278) | L9A (279) | L9D (346) |
| L9E (347) | L9K (348) | L9N (349) | L9R (350) | L9S (351) |
| Q10D (352) | Q10B (353) | Q10K (354) | Q10N (355) | Q10R (356) |
| Q10S (357) | Q10T (358) | Q10C (653) | F15I (282) | F15V (283) |
| F15D (377) | F15E (378) | F15K (379) | F15R (380) | Q16D (381) |
| Q16E (382) | Q16K (383) | Q16N (384) | Q16R (385) | Q16S (386) |
| Q16T (387) | Q16C (655) | Q18H (623) | Q18S (624) | Q18T (625) |
| Q18N (626) | L20I (8) | L20V (9) | L20H (537) | L20A (538) |
| L20N (396) | L20Q (402) | L20R (398) | L20S (399) | L20T (400) |
| L20D (401) | L20E (397) | L20K (403) | L21I (10) | L21V (11) |
| L21T (539) | L21Q (540) | L21H (541) | L21A (542) | Q23H (627) |
| Q23S (628) | Q23T (629) | Q23N (630) | Q23D (408) | Q23E (409) |
| Q23K (410) | Q23R (411) | L28V (295) | L28I (296) | L28T (297) |
| L28Q (298) | L28H (299) | L28A (300) | E29N (547) | E29Q (301) |
| E29H (302) | Y30H (303) | Y30I (304) | L32V (305) | L32I (306) |
| L32T (307) | L32Q (308) | L32H (309) | L32A (310) | F38I (16) |
| F38V (17) | E42N (551) | E42Q (157) | E42H (158) | E43Q (20) |
| E43H (21) | E43N (22) | L47V (163) | L47I (164) | L47T (165) |
| L47Q (166) | L47H (167) | L47A (168) | Q48H (631) | Q48S (632) |
| Q48T (633) | Q48N (634) | Q49H (635) | Q49S (636) | Q49T (637) |
| Q49N (638) | F501 (23) | F50V (24) | Q51H (639) | Q51S (640) |
| Q51T (641) | Q51N (642) | E53Q (25) | E53H (26) | E53N (27) |
| L57I (30) | L57V (31) | L57T (555) | L57Q (556) | L57H (557) |
| L57A (558) | Y60H (32) | Y60I (33) | E61Q (34) | E61H (35) |
| E61N (36) | L63I (39) | L63V (40) | L63T (562) | L63Q (563) |
| L63H (564) | L63A (565) | Q64H (643) | Q64S (644) | Q64T (645) |
| Q64N (646) | F67I (173) | F67V (174) | F70I (41) | F70V (42) |
| Q72H (647) | Q72S (648) | Q72T (649) | Q72N (650) | E81N (567) |
| E81Q (180) | E81H (181) | E85N (568) | E85Q (182) | E85H (183) |
| L87I (45) | L87V (46) | L87H (569) | L87A (570) | L87D (447) |
| L87E (448) | L87K (449) | L87R (450) | L87N (451) | L87Q (452) |
| L87S (453) | L87T (454) | L88I (47) | L88V (48) | L88T (571) |
| L88Q (572) | L88H (573) | L88A (574) | Y92H (184) | Y92I (185) |
| Q94D (474) | Q94E (475) | Q94K (476) | Q94N (477) | Q94R (478) |
| Q94S (479) | Q94T (480) | Q94C (656) | L98I (49) | L98V (50) |
| L98H (575) | L98A (576) | L98D (497) | L98E (498) | L98K (499) |
| L98N (500) | L98Q (501) | L98R (502) | L98S (503) | L98T (504) |
| L98C (658) | L102I (51) | L102V (52) | L102T (578) | L102Q (579) |
| L102H (580) | L102A (581) | E103N (582) | E103Q (190) | E103H (191) |
| E104N (583) | E104Q (192) | E104H (193) | L106I (53) | L106V (54) |
| L106T (585) | L106Q (586) | L106H (587) | L106A (588) | E107N (589) |
| E107Q (198) | E107H (199) | E109N (591) | E109H (205) | E109Q (204) |
| F111I (209) | F111V (210) | L116V (213) | L116I (214) | L116T (215) |
| L116Q (216) | L116H (217) | L116A (218) | L120V (219) | L120I (220) |
| L120T (221) | L120Q (222) | L120H (223) | L120A (224) | Y125H (61) |
| Y125I (62) | Y126H (63) | Y126I (64) | L130V (233) | L130I (234) |
| L130T (235) | L130Q (236) | L130H (237) | L130A (238) | Y132H (65) |
| Y132I (66) | L133I (67) | L133V (68) | L133T (604) | L133Q (605) |
| L133H (606) | L133A (607) | E137N (610) | E137Q (247) | E137H (248) |
| Y138H (69) | Y138I (70) | E149Q (75) | E149H (76) | E149N (77) |
| L151I (78) | L151V (79) | L151T (611) | L151Q (612) | L151H (613) |
| L151A (614) | F154I (80) | F154V (81) | F156I (82) | F156V (83) |
| L160I (84) | L160V (85) | L160T (615) | L160Q (616) | L160H (617) |
| L160A (618) | Y163H (249) | Y163I (250) | L164I (86) | L164V (87) |
| L164T (619) | L164Q (620) | L164H (621) | L164A (622) | |

[0396] A modified IFN-β polypeptide provided herein that exhibits increased protease resistance to gelatinase B can contain one or more amino acid modifications corresponding to modifications selected from any of Y3H, Y3I, L5V, L5I, L5T, L5Q, L5H, L5A, L5D, L5E, L5K, L5R, L5N, L5S, L6I, L6V, L6H, L6A, L6D, L6E, L6K, L6N, L6Q, L6R, L6S, L6T, L6C, F8I, F8V, F8D, F8E, F8K, F8R, L9V, L9I, L9T, L9Q, L9H, L9A, L9D, L9E, L9K, L9N, L9R, L9S, Q10D, Q10E, Q10K, Q10N, Q10R, Q10S, Q10T, Q10C, F15I, F15V, F15D, F15E, F15K, F15R, Q16D, Q16E, Q16K, Q16N, Q16R, Q16S, Q16T, Q16C, Q18H, Q18S, Q18T, Q18N, L20I, L20V, L20H, L20A, L20N, L20Q, L20R, L20S, L20T, L20D, L20E, L20K, L21I, L21V, L21T, L21Q, L21H, L21A, Q23H, Q23S, Q23T, Q23N, Q23D, Q23E, Q23K, Q23R, L28V, L28I, L28T, L28Q, L28H, L28A, E29N, E29Q, E29H, Y30H, Y30I, L32V, L32I, L32T, L32Q, L32H, L32A, F38I, F38V, E42N, E42Q, E42H, E43Q, E43H, E43N, L47V, L47I, L47T, L47Q, L47H, L47A, Q48H, Q48S, Q48T, Q48N, Q49H, Q49S, Q49T, Q49N, F50I, F50V, Q51H, Q51S, Q51T, Q51N, E53Q, E53H, E53N, L57I, L57V, L57T, L57Q, L57H, L57A, Y60H, Y60I, E61Q, E61H, E61N, L63I, L63V, L63T, L63Q, L63H, L63A, Q64H, Q64S, Q64T, Q64N, F67I, F67V, F70I, F70V, Q72H, Q72S, Q72T, Q72N, E81N, E81Q, E81H, E85N, E85Q, E85H, L87I, L87V, L87H, L87A, L87D, L87E, L87, L87R, L87N, L87Q, L87S, L87T, L88I, L88V, L88T, L88Q, L88H, L88A, Y92H, Y92I, Q94D, Q94E, Q94K, Q94N, Q94R, Q94S, Q94T, Q94C, L98I, L98V, L98H, L98A, L98D, L98E, L98K, L98N, L98Q, L98R, L98S, L98T, L98C, L102I, L102V, L102T, L102Q, L102H, L102A, E103N, E103Q, E103H, E104N, E104Q, E104H, L106I, L106V, L106T, L106Q, L106H, L106A, E107N, E107Q, E107H, E109N, E109H, E109Q, F111I, F111V, L116V, L116I, L116T, L116Q, L116H, L116A. L116V, L116I, L116T, L116Q, L116H, L116A, Y125H, Y125I, Y126H, Y126I, L130V, L130I, L130T, L130Q, L130H, L130A, Y132H, Y132I, L133I, L133V, L133T, L133Q, L133H, L133A, E137N, E137Q, E137H, Y138H, Y138I, E149Q, E149H, E149N, L151Q, L151V, L151T, L151Q, L151H, L151A, F154I, F154V, F156I, F156V, L160I, L160V, L160T, L160Q, L160H, L160A, Y163H, Y163I, L164I, L164V, L164T, L164Q, L164H, and L164A of a mature IFN-β polypeptide set forth in SEQ ID NO:1. In some examples, the modifications are in an IFN-β polypeptide having a sequence of amino acids set forth in SEQ ID NO:1 or SEQ ID NO:3. Exemplary modified IFN-β candidate LEAD polypeptides are set forth in any one of SEQ ID NOS: 4-11, 16, 17, 20-27, 30-36, 39-42, 45-54, 61-70, 75-87, 157, 158, 163-168, 173, 174, 180-185, 190-193, 198, 199, 204, 205, 209, 210, 213-224, 233-238, 247-250, 266-279, 282, 283, 295-310, 328-358, 377-387, 396-403, 408-411, 447-454, 474-479, 497-504, 540-542, 547, 551, 555-558, 562-576, 578-583, 585-589, 591, 604-607, 610-614, 616-650, 652, 653, 655, 656, and 658.

[0397] In one example, modified IFN-β polypeptides exhibit increased protease resistance to gelatinase B compared to an unmodified IFN-β polypeptide of SEQ ID NO:1 and contain one or more amino acid modifications corresponding to modification of any of Y3I, Q18S, Q18N, L20I, L20V, E42N, E43N, Q48H, Q48S, Q48T, Q49H, Q49S, Q49T, F50I, F50V, Q51H, Q51S, Q51T, Q51N, E53N, L57I, Y60I, E61H, E61N, L63I, Q64H, Q64S, Q64T, F70I, F70V, Q72H, Q72S, E85N, L88I, L88V, L98I, L98V, E103N, E104N, L106I, L106V, E107N, E109N, Y125I, Y126I, Y132I, E149H, E149N, L151I, and F154V of a mature IFN-β polypeptide set forth in SEQ ID NO:1. Exemplary modified IFN-β candidate LEAD polypeptides are set forth in any one of SEQ ID NOS: 5, 8, 9, 22-24, 27, 30, 33, 35, 36, 39, 41, 42, 47-50, 53, 54, 62, 64, 66, 76-78, 81, 551, 568, 582, 583, 589, 591, 624, 626, 631-633, 635-637, 639-645, 647, and 648. In another example, an IFN-β polypeptide exhibits increased resistance to gelatinase B compared to an unmodified IFN-β polypeptide of SEQ ID NO:3 and contains one or more amino acid modifications corresponding to any one or more modification of any of Y3I, Q18S, Q18N, L20I, L20V, L21I, L21V, E42N, E43N, Q48H, Q48S, Q48T, Q49H, Q49S, Q49T, F50I, F50V, Q51H, Q51S, Q51T, Q51N, E53N, L57I, Y60I, E61H, E61N, L63I, Q64H, Q64S, Q64T, F70I, F70V, Q72H, Q72S, E85N, L88I, L88V, L98I, L98V, E103N, E104N, L106I, L106V, E107N, E109N, Y125I, Y126I, Y132I, E149H, E149N, L151I, F154V, L160I, and L160V of a mature IFN-β polypeptide set forth in SEQ ID NO:1. Additionally, a modified IFN-β containing any one or more modification as set forth above can contain a further modification. Generally, the resulting polypeptide exhibits increased resistance to gelatinase B and retains one or more activities of the unmodified IFN-β. The further modification can be one or more replacement(s) at an amino acid position corresponding to any of positions 3, 5, 6, 8, 9, 10, 15, 16, 18, 20, 21, 23, 28, 29, 30, 32, 38, 42, 43, 47, 48, 49, 53, 57, 60, 61, 63, 64, 67, 72, 81, 85, 87, 88, 92, 94, 98, 102, 103, 104, 106, 107, 109, 111, 116, 120, 125, 126, 130, 132, 133, 137, 138, 149, 151, 154, 156, 160, 163, and 164 of a mature IFN-β polypeptide set forth in SEQ ID NO:1. Amino acid modifications can occur at one or more of amino acid positions corresponding to any of positions Y3, L5, L6, F8, L9, Q10, F15, Q16, Q18, L20, L21, W22, Q23, L28, E29, Y30, L32, F38, E42, E43, L47, Q48, Q49, E53, L57, Y60, E61, L63, Q64, F67, Q72, E81, E85, L87, L88, Y92, Q94, L98, L102, E103, E104, L106, E107, E109, F111, L1116, L120, Y125, Y126, L130, Y132, L133, E137, Y138, E149, L151, F154, F156, L160, Y163, and L164 of a mature IFN-β polypeptide set forth in SEQ ID NO:1. For example, the further amino acid modification can be any one or more modification corresponding to modification of any of Y3H, L5V, L5I, L5T, L5Q, L5H, L5A, L5D, L5E, L5K, L5R, L5N, L5S, L6I, L6V, L6H, L6A, L6D, L6E, L6K, L6N, L6Q, L6R, L6S, L6T, L6C, F8I, F8V, F8D, F8E, F8K, F8R, L9V, L9I, L9T, L9Q, L9H, L9A, L9D, L9E, L9K, L9N, L9R, L9S, Q10D, Q10E, Q10K, Q10N, Q10R, Q10S, Q10T, Q10C, F15I, F15V, F15D, F15E, F15K, F15R, Q16D, Q16E, Q16K, Q16N, Q16R, Q16S, Q16T, Q16C, Q18H, Q18T, L20H, L20A, L20N, L20Q, L20R, L20S, L20T, L20D, L20E, L20K, L21I, L21V, L21T, L21Q, L21H, L21A, Q23H, Q23S, Q23T, Q23N, Q23D, Q23E, Q23K, Q23R, L28V, L28I, L28T, L28Q, L28H, L28A, E29N, E29Q, E29H, Y30H, Y30I, L32V, L32I, L32T, L32Q, L32H, L32A, F38I, F38V, E42Q, E42H, E43Q, E43H, L47V, L47I, L47T, L47Q, L47H, L47A, Q48N, Q49N, E53Q, E53H, L57V, L57T, L57Q, L57H, L57A, Y60H, E61Q, L63V, L63T, L63Q, L63H, L63A, Q64N, F67I, F67V, Q72T, Q72N, E81N, E81Q, E81H, E85Q, E85H, L87I, L87V, L87H, L87A, L87D, L87E, L87, L87R, L87N, L87Q, L87S, L87T, L88T, L88Q, L88H, L88A, Y92H, Y92I, Q94D, Q94E, Q94K, Q94N, Q94R, Q94S, Q94T, Q94C, L98H, L98A, L98D, L98E, L98K, L98N, L98Q, L98R, L98S, L98T, L98C, L102I, L102V, L102T, L102Q, L102H, L102A, E103Q, E103H, E104Q, E104H, L106T, L106Q, L106H, L106A, E107Q, E107H, E109H, E109Q, F111I, F111V, L116V, L116I, L116T, L116Q, L116H, L116A. L116V, L116I, L116T, L116Q, L116H, L116A, Y125H, Y126H, L130V, L130I, L130T, L130Q, L130H, L130A, Y132H, L133I, L133V, L133T, L133Q, L133H, L133A, E137N, E137Q, E137H, Y138H, Y138I, E149Q, L151V, L151T, L151Q, L151H, L151A, F154I, F156I, F156V, L160I, L160V, L160T, L160Q, L160H, L160A, Y163H, Y163I, L164I, L164V, L164T, L164Q, L164H, and L164A of a mature IFN-β polypeptide set forth in SEQ ID NO:1.

[0398] In another example, an IFN-β polypeptide provided herein exhibiting increased protease resistance to gelatinase B can contain any two or more amino acid modifications. In one example, the two or more amino acid modifications can by any two or more modifications set forth in Table 7 above. The modifications can be in an unmodified human IFN-β polypeptide set forth in SEQ ID NO:1 or 3. For example, an IFN-β polypeptide can contain two or more amino acid modifications corresponding to any two or more modifications of any of Y3H, Y3I, L5V, L5I, L5T, L5Q, L5H, L5A, L5D, L5E, L5K, L5R, L5N, L5S, L6I, L6V, L6H, L6A, L6D, L6E, L6K, L6N, L6Q, L6R, L6S, L6T, L6C, F8I, F8V, F8D, F8E, F8K, F8R, L9V, L9I, L9T, L9Q, L9H, L9A, L9D, L9E, L9K, L9N, L9R, L9S, Q10D, Q10E, Q10K, Q10N, Q10R, Q10S, Q10T, Q10C, F15I, F15V, F15D, F15E, F15K, F15R, Q16D, Q16E, Q16K, Q16N, Q16R, Q16S, Q16T, Q16C, Q18H, Q18S, Q18T, Q18N, L20I, L20V, L20H, L20A, L20N, L20Q, L20R, L20S, L20T, L20D, L20E, L20K, L21I, L21V, L21T, L21Q, L21H, L21A, Q23H, Q23S, Q23T, Q23N, Q23D, Q23E, Q23K, Q23R, L28V, L28I, L28T, L28Q, L28H, L28A, E29N, E29Q, E29H, Y30H, Y30I, L32V, L32I, L32T, L32Q, L32H, L32A, F38I, F38V, E42N, E42Q, E42H, E43Q, E43H, E43N, L47V, L47I, L47T, L47Q, L47H, L47A, Q48H, Q48S, Q48T, Q48N, Q49H, Q49S, Q49T, Q49N, F50I, F50V, Q51H, Q51S, Q51T, Q51N, E53Q, E53H, E53N, L57I, L57V, L57T, L57Q, L57H, L57A, Y60H, Y60I, E61Q, E61H, E61N, L63I, L63V, L63T, L63Q, L63H, L63A, Q64H, Q64S, Q64T, Q64N, F67I, F67V, F70I, F70V, Q72H, Q72S, Q72T, Q72N, E81N, E81Q, E81H, E85N, E85Q, E85H, L87I, L87V, L87H, L87A, L87D, L87E, L87, L87R, L87N, L87Q, L87S, L87T, L88I, L88V, L88T, L88Q, L88H, L88A, Y92H, Y92I, Q94D, Q94E, Q94K, Q94N, Q94R, Q94S, Q94T, Q94C, L98I, L98V, L98H, L98A, L98D, L98E, L98K, L98N, L98Q, L98R, L98S, L98T, L98C, L102I, L102V, L102T, L102Q, L102H, L102A, E103N, E103Q, E103H, E104N, E104Q, E104H, L106I, L106V, L106T, L106Q, L106H, L106A, E107N, E107Q, E107H, E109N, E109H, E109Q, F111I, F111V, L116V, L116I, L116T, L116Q, L116H, L116A. L116V, L116I, L116T, L116Q, L116H, L116A, Y125H, Y125I, Y126H, Y126I, L130V, L130I, L130T, L130Q, L130H, L130A, Y132H, Y132I, L133I, L133V, L133T, L133Q, L133H, L133A, E137N, E137Q, E137H, Y138H, Y138I, E149Q, E149H, E149N, L151I, L151V, L151T, L151Q, L151H, L151A, F154I, F154V, F156I, F156V, L160I, L160V, L160T, L160Q, L160H, L160A, Y163H, Y163I, L164I, L164V, L164T, L164Q, L164H, and L164A of a mature IFN-β polypeptide set forth in SEQ ID NO:1. Generally, the resulting IFN-β polypeptide exhibits increased protease resistance to gelatinase B and retains one more activities of an unmodified IFN-β polypeptide. In an additional example, an IFN-β polypeptide provided herein can contain any one or more modification set forth in Table 7 above and a further modification or modifications. In one example, the further modification can be one or more replacement(s) at an amino acid position corresponding to any of positions 1, 11, 12, 13, 14, 17, 19, 22, 24, 25, 27, 33, 34, 35, 36, 39, 41, 45, 50, 51, 52, 54, 62, 70, 71, 73, 78, 79, 80, 82, 83, 86, 89, 90, 91, 95, 97, 99, 101, 105, 108, 110, 113, 115, 117, 122, 123, 124, 128, 134, 136, 143, 147, 152, 155, 159, and 165 of a mature IFN-β polypeptide set forth in SEQ ID NO:1. Amino acid modifications can occur at one or more of amino acid positions corresponding to any of positions M1, R11, S12, S13, N14, C17, K19, W22, L24, N25, R27, K33, D34, R35, M36, D39, P41, K45, F50, Q51, K52, D54, M62, F70, R71, D73, G78, W79, N80, T82, I83, N86, A89, N90, V91, I95, H97, K99, V101, K105, K108, D110, R113, K115, M117, L122, K123, R124, R128, K134, K136, W143, R147, R152, Y155, R159, and R165 of a mature IFN-β polypeptide set forth in SEQ ID NO:1. For example, the further amino acid modification can correspond to any one or more of M1V, M1I, M1T, M1A, M1Q, M1D, M1E, M1K, M1N, M1R, M1S, M1C, R11D, R11H, R11Q, S12D, S12E, S12K, S12R, S13D, S13E, S13K, S13N, S13Q, S13R, S13T, S13C, N14D, N14E, N14K, N14Q, N14R, N14S, N14T, C17D, C17E, C17K, C17N, C17Q, C17R, C17S, C17T, K19N, K19Q, K19T, K19S, K19H, W22S, W22H, W22D, W22E, W22K, W22R, L24I, L24V, L24T, L24Q, L24H, L24A, L24D, L24E, L24K, L24R, N25H, N25S, N25Q, R27H, R27Q, K33N, K33Q, K33T, K33S, K33H, D34N, D34Q, D34G, R35H, R35Q, M36V, M36I, M36T, M36Q, M36A, D39N, D39Q, D39H, D39G, P41A, P41S, K45D, K45N, K45Q, K45T, K45S, K45H, F50I, F50V, Q51H, Q51S, Q51T, Q51N, K52D, K52N, K52Q, K52T, K52S, K52H, D54K, D54Q, D54N, D54G, M62I, M62V, M62T, M62Q, M62A, F70I, F70V, R71H, R71Q, D73N, D73Q, D73H, D73G, G78D, G78E, G78K, G78R, W79H, W79S, W79D, W79E, W79K, W79R, N80D, N80E, N80K, N80R, T82D, T82E, T82K, T82R, I83D, I83E, I83K, I83R, I83Q, I83S, I83T, N86D, N86E, N86K, N86R, N86Q, N86S, N86T, A89D, A89E, A89K, A89R, N90D, N90E, N90K, N90Q, N90R, N90S, N90T, N90C, V91D, V91E, V91K, V91N, V91Q, V91R, V91S, V91T, V91C, I95D, I95E, I95K, I95N, I95Q, I95R, I95S, I95T, H97D, H97E, H97K, H97N, H97Q, H97R, H97S, H97T, H97C, K99N, K99Q, K99T, K99S, K99H, V101D, V101E, V101K, V101N, V101Q, V10R, V101S, V101T, V101C, K105D, K105N, K105Q, K105T, K105S, K105H, K108D, K108N, K108Q, K108T, K108S, K108H, D110K, D110N, D110Q, D110H, D110G, R113E, R113H, R113Q, K115D, K115Q, K115N, K115S, K115H, M117I, M117V, M117T, M117Q, M117A, L122I, L122V, L122T, L122Q, L122H, L122A, K123N, K123Q, K123T, K123S, K123H, R124D, R124E, R124H, R124Q, R128H, R128Q, K134N, K134Q, K134T, K134S, K134H, K136N, K136Q, K136T, K136S, K136H, W143H, W143S, R147H, R147Q, R152D, R152H, R152Q, Y155H, Y1551, R159H, R159Q, R165D, R165H, and R165Q of a mature IFN-β polypeptide set forth in SEQ ID NO:1. Non-limiting examples of IFN-β SuperLeads containing two or more amino acid modifications and exhibiting increased resistance to proteolysis by gelatinase B are described in Example 8 and include amino acid replacements at amino acid residues corresponding to L6E/K108S, L5Q/K108S, L5E/K108S, L5N/Q10D, and L5N/K108S of a mature IFN-β polypeptide. Exemplary modified IFN-β SuperLead polypeptides are set forth in any one of SEQ ID NOS: 92, 102, 104, 107, and 112.

[0399] 2. Conformational Stability

[0400] Also provided herein is a modified IFN-β polypeptide exhibiting increased protein stability manifested as increased conformational stability. Generally, the modification results in a polypeptide either improving or maintaining the requisite biological activity (e.g., anti-viral or anti-proliferation activity) of the unmodified IFN-β. Among modifications of interest for therapeutic proteins are those that increase the stability of IFN-β by minimizing denaturation from increased temperatures (i.e. thermal stability) and/or changes in pH. For example, increased conformational stability can be assayed by measuring resistance to temperature such as is described in Example 9. Increased conformational stability can increase the half-life of the protein for production, storage and for therapeutic use. Examples of modifications that contribute to the conformational stability of an IFN-β polypeptide include the addition of charges to a hydrophobic area (e.g., regions in helices A and C) to favor polar interactions with a solvent, increasing intra-molecular polar interactions between helices A and C, creating intra-molecular disulfide bridges, and changing the isoelectric point (pI). Variants with such modifications can be more stable to production conditions, allowing greater flexibility in the use of methods and conditions used to produce and purify the protein. Variants also can be more stable in storage, and thus therapeutic compositions can be prepared in advance and stored under a variety of conditions, making them more accessible therapies. Variants can be more stable for therapeutic use, for example, by increasing half-life (i.e., half-life in vitro, half-life in vivo, at room temperature or at 37° C.) after administration and/or by exhibiting greater stability in a variety of formulations and administration regimes.

[0401] The two-dimensional scanning process for protein evolution can be used to design and generate highly stable, longer lasting proteins, or proteins having a longer half-life. The method includes: i) identifying some or all possible target sites (i.e. is-HIT(s)) on the protein sequence that can participate in conformational stability such as, for example, sites that participate in the interaction and creation of the hydrophobic region of helices A and C and/or in the creation of disulfide bonds; ii) identifying appropriate replacing amino acids, specific for each is-HIT, such that upon replacement of one or more of the original, such as native, amino acids at that specific is-HIT, they can be expected to increase the is-HIT's stability while, at the same time, maintaining or improving the requisite biological activity and specificity of the protein (candidate LEADs); and/or iii) systematically introducing the specific replacing amino acids (candidate LEADs) at every specific is-HIT target position to generate a collection containing the corresponding mutant candidate LEAD molecules. Mutants are generated, produced and phenotypically characterized one-by-one in addressable assays, such as for example resistance to temperature, such that each mutant molecule contains, initially, an amino acid modification at only one is-HIT site. In particular embodiments, such as in subsequent rounds, mutant molecules also can be generated that contain multiple is-HIT sites that have been replaced by candidate LEAD amino acids (i.e. super-LEADs).

[0402] Using the methods described herein, the following is-HIT positions were identified to increase conformational stability of IFN-β: 1, 5, 6, 8, 9, 10, 11, 12, 13, 14, 15, 16, 17, 20, 22, 23, 24, 43, 45, 52, 53, 54, 61, 78, 79, 80, 81, 82, 83, 85, 86, 87, 89, 90, 91, 94, 95, 97, 98, 101, 103, 104, 105, 107, 108, 109, 110, 113, 115, 124, 152, and 165, corresponding to amino acid positions in a mature IFN-β polypeptide set forth in SEQ ID NO:1. As described in detail below, modification of any one or more of the above positions can contribute to increased conformational stability due to the addition of charges to a hydrophobic area (e.g., regions in helices A and C) to favor polar interactions with a solvent, increasing intra-molecular polar interactions between helices A and C, creating intra-molecular disulfide bridges, and changing the isoelectric point (pI). Exemplary amino acids modifications at is-HIT positions include any one or more amino acid modification corresponding to modifications of any of M1E, M1D, M1K, M1R, M1N, M1Q, M1S, M1T, M1C, L5E, L5D, L5K, L5R, L5N, L5Q, L5S, L5T, L6C, F8E, F8D, F8K, F8R, L9E, L9D, L9K, L9R, L9N, L9Q, L9S, L9T, Q10C, Q10E, Q10D, Q10K, Q10R, Q10N, Q10S, Q10T, R11Q, R11D, S12E, S12D, S12K, S12R, S13E, S13D, S13K, S13R, S13N, S13Q, S13T, S13C, N14E, N14D, N14K, N14R, N14Q, N14S, N14T, F15E, F15D, F15K, F15R, Q16E, Q16D, Q16K, Q16R, Q16N, Q16S, Q16T, Q16C, C17E, C17D, C17K, C17R, C17N, C17Q, C17S, C17T, L20E, L20D, L20K, L20R, L20N, L20Q, L20S, L20T, W22E, W22D, W22K, W22R, Q23E, Q23D, Q23K, Q23R, L24E, L24D, L24K, L24R, E43K, K45Q, K45D, K52Q, K52D, E53R, D54K, E61K, G78E, G78D, G78K, G78R, W79E, W79D, W79K, W79R, N80E, N80D, N80K, N80R, E81K, T82E, T82D, T82K, T82R, I83E, I83D, I83K, I83R, I83N, I83Q, I83S, I83T, E85K, N86E, N86D, N86K, N86R, N86Q, N86S, N86T, L87E, L87D, L87K, L87R, L87N, L87Q, L87S, L87T, A89E, A89D, A89K, A89R, N90E, N90D, N90K, N90R, N90Q, N90S, N90T, N90C, V91E, V91D, V91K, V91R, V91N, V91Q, V91S, V91T, V91C, Q94E, Q94D, Q94K, Q94R, Q94N, Q94S, Q94T, Q94C, I95E, I95D, I95K, I95R, I95N, I95Q, I95S, I95T, H97E, H97D, H97K, H97R, H97N, H97Q, H97S, H97T, H97C, L98E, L98D, L98K, L98R, L98N, L98Q, L98S, L98T, L98C, V101C, V101E, V101D, V101K, V101R, V101N, V101Q, V101S, V101T, E103K, E104R, K105Q, K105D, E107R, K108Q, K108D, E109R, D110K, R113Q, R113E, K115Q, K115D, R124Q, R124D, R124E, R152Q, R152D, R165Q, and R165D of a mature IFN-β polypeptide set forth in SEQ ID NO:1. In one example, modifications can be in an unmodified IFN-β polypeptide having a sequence of amino acids set forth in SEQ ID NO:1 or 3.

[0403] Modified IFN-β polypeptides provided herein exhibit increased resistance to denaturation, and thereby increased conformational stability. Such increase in resistance is manifested as at least 1%, 2%, 3%, 4%, 5%, 6%, 7%, 8%, 9%, 10%, . . . 20%, . . . 30%, . . . 40%, . . . 50%, . . . 60%, . . . , 70%, . . . 80%, . . . 90%, 91%, 92%, 93%, 94%, 95%, 96%, 97%, 98%, 99%, 100%, 200%, 300%, 400%, 500%, or more resistant to denaturation compared to the unmodified IFN-β polypeptide. In some examples, denaturation can be assessed as tolerance to temperature (temperature stability). Typically, the half-life in vitro or in vivo (protein stability) of the IFN-β mutants provided herein is increased by an amount selected from at least 5%, at least 10%, at least 20%, at least 30%, at least 40%, at least 50%, at least 60%, at least 70%, at least 80%, at least 90%, at least 100%, at least 150%, at least 200%, at least 250%, at least 300%, at least 350%, at least 400%, at least 450%, at least 500% or more, when compared to the half-life of unmodified or wild-type human IFN-β exposed to particular denaturing conditions, such as thermal conditions (e.g., incubation at room temperature, about 25° C.; or body temperature, about 37° C.).

[0404] Generally, the modified IFN-β polypeptides provided herein exhibit at least one activity that is substantially unchanged (less than 1%, 5% or 10% changed) compared to the unmodified or wild-type IFN-β. In some examples, the modified IFN-β polypeptide exhibits a decrease in an activity. In other examples, a modified IFN-β polypeptide exhibits an increase in an activity. Activity includes, for example, anti-viral or anti-proliferative activity, and can be compared to an unmodified IFN-β polypeptide, such as for example the mature, wild-type IFN-β polypeptide (SEQ ID NO:1), the wild-type precursor IFN-β polypeptide (SEQ ID NO: 2), a commercially available IFN-β polypeptide, (e.g., Betaseron, SEQ ID No: 3), or any other IFN-β polypeptide used as the starting material.

[0405] a. Addition of Charged Residues to Hydrophobic Areas

[0406] Regions of helices A and C of IFN-β form a hydrophobic interface and are protected from exposure to solvent due to glycosylation of the folded polypeptide. There is an N-glycosylation site at position N80. The glycan present on the protein is an oligosaccharide chain of the biantennary complex type, containing an α1-6 linked fucose on the peptide proximal N-acetyl-glucosamine (GlcNac) residue and two α2-3 linked N-acetyl-neuraminic (NANA) on the terminal galactose residues. This glycan possesses a rigid structure and interacts with two side chains of IFN-β via hydrogen bonds (Q23 in helix A and N86 in helix C). Changes in the hydrophobic region of helices A and C can be made to favor polar interactions with the solvent, thereby stabilizing the protein conformation. Additionally, the hydrophobic region of helices A and C also plays a role in the specificity of action of IFN-β. Changes in this region can alter IFN-β activity, for example, by modifying IFN-β activity towards IFN-α activity. Modified polypeptides can be assessed for increased stability, for example, by increased thermal tolerance, such as described herein. In addition, assays that discriminate between IFN-α and IFN-β can be used to assess whether the mutation also affects IFN-β specificity. Any assays known in the art to assess IFN-α and IFN-β activity can be employed.

[0407] Using the methods described herein, the following is-HIT positions were identified to increase conformational stability due to the addition of charges to the hydrophobic regions of helices A and C of IFN-β: 5, 8, 9, 12, 15, 16, 20, 22, 23, 24, 78, 79, 80, 82, 83, 86, 87 and 89, corresponding to positions of a mature IFN-β polypeptide set forth in SEQ ID NO:1. Amino acid modifications can occur at one or more of amino acid positions corresponding to any of positions L5, F8, L9, S12, F15, Q16, L20, W22, Q23, L24, G78, W79, N80, T82, I83, N86, L87, and A89 of a mature IFN-β polypeptide set forth in SEQ ID NO:1. Modification of one or more amino acid residues thereof can add charges to the hydrophobic regions of helices A and C. Exemplary amino acids chosen to introduce an additional charge into the region of helices A and C include glutamic acid (E), aspartic acid (D), lysine (K) and arginine (R). Table 8 provides non-limiting examples of amino acid modifications that increase conformational stability compared to an unmodified IFN-β polypeptide by adding charges to the hydrophobic regions of helices A and C. Generally, a resulting modified polypeptide retains one or more activities of an unmodified IFN-β polypeptide. In one example, modifications can be an unmodified IFN-β polypeptide having a sequence of amino acids set forth in SEQ ID NO:1 or SEQ ID NO:3. In Table 8 below, the sequence identifier (SEQ ID NO:) is in parenthesis next to each substitution.

TABLE 8
Modifications to Add Charged Residues to Increase
Polar Interactions With Solvent

| | | | |
|---|---|---|---|
| L5E (329) | Q16E (382) | G78E (417) | N86E (441) |
| L5D (328) | Q16D (381) | G78D (416) | N86D (440) |
| L5K (330) | Q16K (383) | G78K (418) | N86K (442) |
| L5R (331) | Q16R (385) | G78R (419) | N86R (443) |
| F8E (343) | L20E (397) | W79E (421) | L87E (448) |
| F8D (342) | L20D (401) | W79D (420) | L87D (447) |
| F8K (344) | L20K (403) | W79K (422) | L87K (449) |
| F8R (345) | L20R (398) | W79R (423) | L87R (450) |
| L9E (347) | W22E (405) | N80E (425) | A89E (456) |
| L9D (346) | W22D (404) | N80D (424) | A89D (455) |
| L9K (348) | W22K (406) | N80K (426) | A89K (457) |
| L9R (350) | W22R (407) | N80R (427) | A89R (458) |
| S12E (360) | Q23E (409) | T82E (429) | |
| S12D (359) | Q23D (408) | T82D (428) | |
| S12K (361) | Q23K (410) | T82K (430) | |
| S12R (362) | Q23R (411) | T82R (431) | |
| F15E (378) | L24E (413) | I83E (433) | |
| F15D (377) | L24D (412) | I83D (432) | |
| F15K (379) | L24K (414) | I83K (434) | |
| F15R (380) | L24R (415) | I83R (435) | |

[0408] Modified IFN-β polypeptides provided herein that exhibit increased conformational stability due to the presence of charges in the hydrophobic region between helices A and C can contain one or more amino acid modification corresponding to any one or more modification of L5E, L5D, L5K, L5R, F8E, F8D, F8K, F8R, L9E, L9D, L9K, L9R, S12E, S12D, S12K, S12R, F15E, F15D, F15K, F15R, Q16E, Q16D, Q16K, Q16R, L20E, L20D, L20K, L20R, W22E, W22D, W22K, W22R, Q23E, Q23D, Q23K, Q23R, L24E, L24D, L24K, L24R, G78E, G78D, G78K, G78R, W79E, W79D, W79K, W79R, N80E, N80D, N80K, N80R, T82E, T82D, T82K, T82R, I83E, I83D, I83K, I83R, N86E, N86D, N86K, N86R, L87E, L87D, L87K, L87R, A89E, A89D, A89K, and A89R of a mature IFN-β polypeptide set forth in SEQ ID NO:1. In some examples, the modifications can be in an unmodified IFN-β polypeptide having a sequence of amino acids set forth in SEQ ID NO:1 or SEQ ID NO:3. Exemplary modified IFN-β candidate LEAD polypeptides are set forth in any one of SEQ ID NOS: 329-331, 342-348, 350, 359-362, 377-383, 385 397-398, 401, 403-435, 440-443, 447-450, and 455-458.

[0409] In another example, an IFN-β polypeptide provided herein exhibiting increased conformational stability due to the presence of charges in the hydrophobic region between helices A and C can contain any two or more amino acid modifications. In one example, the two or more amino acid modifications can be any two or more modifications set forth in Table 8 above. The amino acid modifications can be in an unmodified IFN-β polypeptide, such as for example an unmodified IFN-β polypeptide set forth in SEQ ID NO:1 or 3. For example, an IFN-β polypeptide can contain two or more amino acid modifications corresponding to any two or more modifications of L5E, L5D, L5K, L5R, F8E, F8D, F8K, F8R, L9E, L9D, L9K, L9R, S12E, S12D, S12K, S12R, F15E, F15D, F15K, F15R, Q16E, Q16D, Q16K, Q16R, L20E, L20D, L20K, L20R, W22E, W22D, W22K, W22R, Q23E, Q23D, Q23K, Q23R, L24E, L24D, L24K, L24R, G78E, G78D, G78K, G78R, W79E, W79D, W79K, W79R, N80E, N80D, N80K, N80R, T82E, T82D, T82K, T82R, I83E, I83D, I83K, I83R, N86E, N86D, N86K, N86R, L87E, L87D, L87K, L87R, A89E, A89D, A89K, and A89R of a mature IFN-β polypeptide set forth in SEQ ID NO: 1. Generally, the resulting IFN-β polypeptide exhibits increased conformational stability and retains one more activities of an unmodified IFN-β polypeptide.

[0410] b. Increasing Polar Interactions Between Helices A and C

[0411] The conformational stability of an IFN-β polypeptide also can be achieved by changes in helices A and C that increase polar interactions between the helices. As described above, the hydrophobic area at the vicinity of the glycosylation site is formed by the interface between helices A and C. There are few polar interactions between the residues of these helices. This renders this region susceptible to denaturation. For example, in the absence of glycosylation, the protein could be destabilized and this could lead to the opening of the interface between helices A and C and thus expose a cysteine residue at position 17 that can become reactive and contribute to the formation of intermolecular disulfide bonds and possibly protein aggregation. Increasing polar interactions between helices A and C can increase the conformational stability and, thereby, the stability and half-life of IFN-β.

[0412] Using the methods described herein, the following is-HIT positions were identified to increase conformational stability by increasing polar interactions between helices A and C of IFN-β: 1, 5, 6, 9, 10, 13, 14, 16, 17, 20, 83, 86, 87, 90, 91, 94, 95, 97, 98, and 101, corresponding to amino acid positions of a mature IFN-β polypeptide set forth in SEQ ID NO:1. Amino acid modifications can occur at one or more of amino acid positions corresponding to any of positions M1, L5, L6, L9, Q10, S13, N14, Q16, C17, L20, I83, N86, L87, N90, V91, Q94, I95, H97, L98, and V101 of a mature IFN-β polypeptide set forth in SEQ ID NO:1. Modification of one or more amino acid residues thereof can contribute to polar interactions between helices A and C. Exemplary amino acids chosen to increase polar interactions between the region of helices A and C include glutamic acid (E), aspartic acid (D), lysine (L), arginine (R), asparagine (N), glutamine (Q), serine (S), and threonine (T). Table 9 provides non-limiting examples of amino acid modifications that contribute to increased conformational stability of an IFN-β polypeptide by increasing polar interactions between helices A and C and, thereby, protein stability. Generally, a resulting modified polypeptide retains one or more activities of the unmodified IFN-β polypeptide. In Table 9 below, the sequence identifier (SEQ ID NO:) is in parenthesis next to each substitution.

TABLE 9
Modifications to Increase Polar Interactions Between Helices A and C

| | | | | | |
|---|---|---|---|---|---|
| M1E (323) | L9K (348) | N14T (376) | I83K (434) | N90S (464) | H97D (489) |
| M1D (322) | L9R (350) | Q16E (382) | I83R (435) | N90T (465) | H97K (491) |
| M1K (324) | L9N (349) | Q16D (381) | I83N (436) | V91E (467) | H97R (494) |
| M1R (326) | L9Q (277) | Q16K (383) | I83Q (437) | V91D (466) | H97N (492) |
| M1N (325) | L9S (351) | Q16R (385) | I83S (438) | V91K (468) | H97Q (493) |
| M1Q (261) | L9T (276) | Q16N (384) | I83T (439) | V91R (471) | H97S (495) |
| M1S (327) | Q10E (353) | Q16S (386) | N86E (441) | V91N (469) | H97T (496) |
| M1T (264) | Q10D (352) | Q16T (387) | N86D (440) | V91Q (470) | L98E (498) |
| L5E (329) | Q10K (354) | C17E (389) | N86K (442) | V91S (472) | L98D (497) |
| L5D (328) | Q10R (356) | C17D (388) | N86R (443) | V91T (473) | L98K (499) |
| L5K (330) | Q10N (355) | C17K (390) | N86Q (444) | Q94E (475) | L98R (502) |
| L5R (331) | Q10S (357) | C17R (393) | N86S (445) | Q94D (474) | L98N (500) |
| L5N (332) | Q10T (358) | C17N (391) | N86T (446) | Q94K (476) | L98Q (501) |
| L5Q (269) | S13E (364) | C17Q (392) | L87E (448) | Q94R (478) | L98S (503) |
| L5S (333) | S13D (363) | C17S (394) | L87D (447) | Q94N (477) | L98T (504) |
| L5T (268) | S13K (365) | C17T (395) | L87K (449) | Q94S (479) | V101E (506) |
| L6E (335) | S13R (368) | L20E (397) | L87R (450) | Q94T (480) | V101D (505) |
| L6D (334) | S13N (366) | L20D (401) | L87N (451) | I95E (482) | V101K (507) |
| L6K (336) | S13Q (367) | L20K (403) | L87Q (452) | I95D (481) | V101R (510) |
| L6R (339) | S13T (369) | L20R (398) | L87S (453) | I95K (483) | V101N (508) |
| L6N (337) | N14E (371) | L20N (396) | L87t (454) | I95R (486) | V101Q (509) |
| L6Q (338) | N14D (370) | L20Q (402) | N90E (460) | I95N (484) | V101S (511) |
| L6S (340) | N14K 372) | L20S (399) | N90D (459) | I95Q (485) | V101T (512) |
| L6T (341) | N14R (374) | L20T (400) | N90K (461) | I95S (487) | |
| L9E (347) | N14Q (373) | I83E (433) | N90R (463) | I95T (488) | |
| L9D (346) | N14S (375) | I83D (432) | N90Q (462) | H97E (490) | |

[0413] Modified IFN-β polypeptide provided herein that exhibit increased conformational stability due to increased polar interactions between helices A and C can contain one or more amino acid modifications corresponding to any one or more modification of M1E, M1D, M1K, M1R, M1N, M1Q, M1S, M1T, L5E, L5D, L5K, L5R, L5N, L5Q, L5S, L5T, L6E, L6D, L6K, L6R, L6N, L6Q, L6S, L6T, L9E, L9D, L9K, L9R, L9N, L9Q, L9S, L9T, Q10E, Q10D, Q10K, Q10R, Q10N, Q10S, Q10T, S13E, S13D, S13K, S13R, S13N, S13Q, S13T, N14E, N14D, N14K, N14R, N14Q, N14S, N14T, Q16E, Q16D, Q16K, Q16R, Q16N, Q16S, Q16T, C17E, C17D, C17K, C17R, C17N, C17Q, C17S, C17T, L20E, L20D, L20K, L20R, L20N, L20Q, L20S, L20T, I83E, I83D, I83K, I83R, I83N, I83Q, I83S, I83T, N86E, N86D, N86K, N86R, N86Q, N86S, N86T, L87E, L87D, L87K, L87R, L87N, L87Q, L87S, L87T, N90E, N90D, N90K, N90R, N90Q, N90S, N90T, V91E, V91D, V91K, V91R, V91N, V91Q, V91S, V91T, Q94E, Q94D, Q94K, Q94R, Q94N, Q94S, Q94T, I95E, I95D, I95K, I95R, I95N, I95Q, I95S, I95T, H97E, H97D, H97K, H97R, H97N, H97Q, H97S, H97T, L98E, L98D, L98K, L98R, L98N, L98Q, L98S, L98T, V101E, V101D, V101K, V101R, V101N, V101Q, V101S, and V101T of a mature IFN-β polypeptide set forth in SEQ ID NO:1. In some examples, the modifications can be in an unmodified IFN-β polypeptide having a sequence of amino acids set forth in SEQ ID NO:1 or SEQ ID NO:3. Exemplary modified IFN-β candidate LEAD polypeptides are set forth in any one of SEQ ID NOS: 264, 268, 269, 276, 277, 322-341, 346-358, 363-376, 381-403, 432-454, and 459-512.

[0414] In another example, an IFN-β polypeptide provided herein exhibiting increased conformational stability due to increased polar interactions between helices A and C can contain any two or more amino acid modifications. The two or more amino acid modifications can by any two or more modifications set forth in Table 9 above. The two or more modifications can be in an unmodified IFN-β polypeptide, such as but not limited to, an unmodified IFN-β polypeptide set forth in SEQ ID NO:1 or 3. For example, an IFN-β polypeptide can contain two or more amino acid modifications corresponding to any two or more modifications of M1E, M1D, M1K, M1R, M1N, M1Q, M1S, M1T, L5E, L5D, L5K, L5R, L5N, L5Q, L5S, L5T, L6E, L6D, L6K, L6R, L6N, L6Q, L6S, L6T, L9E, L9D, L9K, L9R, L9N, L9Q, L9S, L9T, Q10E, Q10D, Q10K, Q10R, Q10N, Q10S, Q10T, S13E, S13D, S13K, S13R, S13N, S13Q, S13T, N14E, N14D, N14K, N14R, N14Q, N14S, N14T, Q16E, Q16D, Q16K, Q16R, Q16N, Q16S, Q16T, C17E, C17D, C17K, C17R, C17N, C17Q, C17S, C17T, L20E, L20D, L20K, L20R, L20N, L20Q, L20S, L20T, I83E, I83D, I83K, I83R, I83N, I83Q, I83S, I83T, N86E, N86D, N86K, N86R, N86Q, N86S, N86T, L87E, L87D, L87K, L87R, L87N, L87Q, L87S, L87T, N90E, N90D, N90K, N90R, N90Q, N90S, N90T, V91E, V91D, V91K, V91R, V91N, V91Q, V91S, V91T, Q94E, Q94D, Q94K, Q94R, Q94N, Q94S, Q94T, I195E, I95D, I95K, I95R, I95N, I95Q, I95S, I95T, H97E, H97D, H97K, H97R, H97N, H97Q, H97S, H97T, L98E, L98D, L98K, L98R, L98N, L98Q, L98S, L98T, V101E, V101D, V101K, V101R, V101N, V101Q, V101S, and V101T of a mature IFN-α polypeptide set forth in SEQ ID NO:1. Generally, the resulting IFN-β polypeptide exhibits increased conformational stability and retains one more activities of an unmodified IFN-β polypeptide.

[0415] c. Creation of Disulfide Bridges

[0416] Among modifications of interest for therapeutic proteins are those that increase conformational stability of IFN-β by minimizing denaturation and thus increasing the half-life of the protein for production, storage and for therapeutic use. One such type of modification is the introduction of intra-molecular disulfide bridges. For example, the risk of denaturation of an IFN-β polypeptide can be reduced by creating disulfide bridges between helices A and C. Introduction of disulfide bridges can minimize protein denaturation, such as denaturation from increased temperatures, and/or changes in pH.

[0417] Using the methods described herein, the following is-HIT positions were identified to increase conformational stability by introducing disulfide bridges in IFN-β: 1, 6, 10, 13, 16, 90, 91, 94, 97, 98, and 101, corresponding to amino acid positions of a mature IFN-β polypeptide set forth in SEQ ID NO:1. Amino acid modifications can occur at one or more amino acid positions corresponding to any of positions M1, L6, Q10, S13, Q16, N90, V91, Q94, H97, L98, and V101 of a mature IFN-β polypeptide set forth in SEQ ID NO:1. Modification of one or more amino acid residues thereof to a cysteine (C) can contribute to the formation of a disulfide bridge in an IFN-β polypeptide. Table 10 provides non-limiting examples of amino acid modifications that increase conformational stability by contributing to the formation of disulfide bridges between helices A and C and, thereby, protein stability of a modified IFN-β polypeptide. Generally, a resulting IFN-β polypeptide retains one or more activities of the unmodified IFN-β polypeptide. In one example, a modified IFN-β polypeptide containing one modification as set forth above can exhibit conformational stability by the formation of a disulfide bridge with a cysteine occurring in the native human IFN-β. For example, position C17 in a native human IFN-β, such as an IFN-β polypeptide having a sequence of amino acids set forth in SEQ ID NO:1, can contribute to the formation of a disulfide bridge. In another example, a modified IFN-β polypeptide containing two modifications as set forth above can exhibit conformational stability by the formation of a disulfide bridge between the modified cysteine residues. In Table 10 below, the sequence identifier (SEQ ID No.) is in parenthesis next to each substitution.

TABLE 10
Modification to Create Disulfide Bridges

| | |
|---|---|
| M1C (651) | V91C (131) |
| L6C (652) | Q94C (656) |
| Q10C (653) | H97C (657) |
| S13C (654) | L98C (658) |
| Q16C (655) | V101C (659) |
| N90C (129) | |

[0418] Modified IFN-β polypeptides provided herein that exhibit increased conformational stability due to the creation of intra-molecular disulfide bridges between helices A and C can contain one or more amino acid modifications corresponding to any one or more modifications of M1C, L6C, Q10C, S13C, Q16C, N90C, V91C, Q94C, H97C, L98C, and V101C of a mature IFN-β polypeptide set forth in SEQ ID NO:1. Generally, the resulting IFN-β polypeptide exhibits increased conformational stability and retains one or more activities of an unmodified IFN-β polypeptide. In one example, an unmodified IFN-β polypeptide has a sequence of amino acids set forth in SEQ ID NO:1 or 3. Exemplary modified IFN-β candidate LEAD polypeptides are set forth in any one of SEQ ID NOS: 129, 131, 651-659. In some examples, a modified IFN-β polypeptide contains two amino acid modifications such as any two modifications corresponding to any modifications of M1C, L6C, Q10C, S13C, Q16C, N90C, V91C, Q94C, H97C, L98C, and V101C of a mature IFN-α polypeptide set forth in SEQ ID NO:1. Exemplary IFN-β candidate LEAD polypeptides, containing one or more modifications set forth above, that contribute to the formation of an intra-molecular disulfide bridge are set forth in Table 11. In Table 11 below, the sequence identifier (SEQ ID No.) is in parenthesis next to each exemplary IFN-β LEAD polypeptide. Provided herein are modified IFN-β candidate LEAD polypeptides exhibiting increased conformational stability due to the formation of disulfide bridges having a sequence of amino acids set forth in any of SEQ ID NOS: 126-133.

TABLE 11
Exemplary IFN-β LEAD Polypeptides for the
Formation of Disulfide Bridges

| | |
|---|---|
| M1C-V101C (126) | Q10C-H97C (130) |
| Q16C-N90C (127) | C17C-V91C (131) |
| L6C-L98C (128) | Q10C-L98C (132) |
| C17C-N90C (129) | S13C-Q94C (133) |

[0419] d. Modification of the Isoelectric Point (pI)

[0420] Protein-protein interactions can affect protein stability. For example, protein multimerization can stabilize a protein by allowing protein surfaces (1) to interact, (2) to form a stable structure and/or (3) to be protected from interaction with solvent and other molecules. Protein-protein interactions, however, can contribute to aggregation. For example, upon denaturation of a protein, hydrophobic regions that are normally shielded from exposure to solvent can become exposed. As a result, the denatured protein aggregates by interaction of hydrophobic regions to protect exposure to solvent. Multimers formed in aggregation tend to be less structured and less stable. In some cases, protein aggregates are targeted for degradation. Thus, reducing aggregation is one method for increasing protein stability and protein half-life. The charged state of a protein can affect the ability of the protein to multimerize and/or aggregate. The isoelectric point (pI) is a measure of the charged state of a protein relative to pH such that at the pH of the isoelectric point, the protein is no longer charged and is neutral. The solubility of a protein is lowest at its isoelectric point. Thus, aggregation of a protein often occurs when the pH is close to the isoelectric point of a protein. For example, there are approximately 40 charged amino acids in IFN-β and the isoelectric point of IFN-β is 8.93. Aggregation of IFN-β has been observed at pH 6-7, but IFN-β is observed to have increased stability at pH 4. This increased stability could be related to surface charge of the protein at low pH. This is because a protein exposed to a pH that is lowered far below its pI will lose its negative charge and will have a predominantly positive charge. The like charges will repel each other and prevent the protein from aggregating as readily.

[0421] Modifications of interest contemplated herein are modifications that alter the isoelectric point of IFN-β, thereby contributing to the conformational stability of an IFN-β polypeptide at a more neutral pH of 6-7 by reducing protein aggregation, yet retaining one or more activities of an unmodified IFN-β polypeptide. In one example, the pI can be increased above its native pI of 8.93, such that, for example, the pI can be increased to greater than 9.0, 9.2, 9.4, 9.6, 9.8, 10.0, 10.2, 10.4, 10.6, 10.8, 11.0, 11.2, 11.4, 11.6, 11.8, 12.0. For example, the pI can be increased such that the same charged state observed at pH 4 is observed at a more neutral pH of 6 (i.e. pI 11) so that aggregation is minimized. In another example, the pI can be decreased such that at a neutral pH the protein exhibits a surface charge that prevents aggregation. In selecting is-HIT positions, positions situated in regions interacting with the receptor, IFNAR-1 (amino acid residues 64-73, 92-100 and 128-137 of SEQ ID NO:1) and IFNAR-2 (amino acid residues 15-42 and 148-158 of SEQ ID NO:1) were excluded as is-HITs to maintain IFN-β activity.

[0422] i. Increasing Isoelectric Point (pI)

[0423] Provided herein are modified IFN-β polypeptides exhibiting increased conformational stability due to an increased isoelectric point compared to an unmodified IFN-β polypeptide. In one example, modified IFN-β polypeptides provided herein contain one or more modifications that cause an increase in the pI of the modified IFN-β polypeptide by about 0.3 or 0.3 compared to an unmodified IFN-β polypeptide. Using the methods described herein, the following is-HIT positions were identified that contribute to increasing the isoelectric point of IFN-β by about 0.3 or 0.3: 43, 53, 54, 61, 81, 85, 103, 104, 107, 109, and 110, corresponding to amino acid positions of a mature IFN-β polypeptide set forth in SEQ ID NO:1. Amino acid modifications can occur at one or more of amino acid positions corresponding to any of positions E43, E53, D54, E61, E81, E85, E103, E104, E107, E109 and D110 of a mature IFN-β polypeptide set forth in SEQ ID NO:1. In some examples, modifications are in an unmodified IFN-β polypeptide having sequence of amino acids set forth in SEQ ID NO:1 or SEQ ID NO:3. Modification of one or more amino acid residues of a Glutamic Acid (E) or an Aspartic Acid (D) to a Lysine (K) or an Arginine (R) can contribute to an increase in the pI of an IFN-β polypeptide. Table 12 provides non-limiting examples of amino acid modifications that increase conformational stability of an IFN-β polypeptide by contributing to an increase in the isoelectric point and, thereby, protein stability. Generally, a resulting polypeptide retains one or more activities of the unmodified IFN-β polypeptide. In Table 12 below, the sequence identifier (SEQ ID No.) is in parenthesis next to each substitution.

TABLE 12
Modification to increase the pI about 0.3 or 0.3

| | |
|---|---|
| E43K (134) | E103K (140) |
| E53R (135) | E104R (141) |
| D54K (136) | E107R (142) |
| E61K (137) | E109R (143) |
| E81K (138) | D110K (144) |
| E85K (139) | |

[0424] Modified IFN-β polypeptides provided herein that exhibit increased conformational stability due to an increased isoelectric point can contain one or more amino acid modifications corresponding to any one or more modification of E43K, E53R, D54K, E61K, E81K, E85K, E103K, E104R, E107R, E109R, and D110K of a mature IFN-β polypeptide set forth in SEQ ID NO:1. Modifications can be in an unmodified IFN-β polypeptide having a sequence of amino acids set forth in SEQ ID NO:1 or SEQ ID NO:3. Exemplary modified IFN-β candidate LEAD polypeptides are set forth in any one of SEQ ID NOS: 134-144.

[0425] In one example, a modified IFN-β polypeptide that exhibits increased conformational stability due to an increased isoelectric point can contain one or more amino acid modifications corresponding to any one or both of D54K and E61K of a mature IFN-β polypeptide set forth in SEQ ID NO:1. Modifications can be an unmodified IFN-β polypeptide having a sequence of amino acids set forth in SEQ ID NO:1 or SEQ ID NO:3. Additionally, a modified IFN-β as set forth above can contain a further modification. The further modification can be any one or more amino acid modifications corresponding to any one or more modification of E43K, E53R, E81K, E85K, E103K, E104R, E104R, E107R, E109R, and D110K of a mature IFN-β polypeptide set forth in SEQ ID NO:1. In another example, a modified IFN-β polypeptide that exhibits increased conformational stability due to an increased isoelectric point can contain two or more amino acid modifications corresponding to any two or more modifications of E43K, E53R, D54K, E61K, E81K, E85K, E103K, E104R, E107R, E109R, and D110K of a mature IFN-β polypeptide set forth in SEQ ID NO:1. Generally, the resulting polypeptide exhibits increased conformational stability and retains one or more activities of the unmodified IFN-β.

[0426] ii. Decreasing Isoelectric Point (pI)

[0427] Provided herein are modified IFN-β polypeptides exhibiting increased conformational stability compared to an unmodified IFN-β polypeptide, due to a decreased isoelectric point. The pI of IFN-β can be decreased by replacing positively charged amino acids with non-charged amino acids. The pI of IFN-β also can be decreased by replacing positively charged amino acids with negatively charged amino acids. For example, arginine and lysine residues can be replaced with either aspartic acid or glutamic acid residues. In one non-limiting example, the pI of a modified IFN-β polypeptide is decreased such that the pI is less than the native IFN-β pI (i.e., 8.93). For example, the pI of a modified IFN-β polypeptide can be decreased to less than 8.9, 8.7, 8.5, 8.3, 8.1, 7.9, 7.7, 7.5, 7.3, 7.1, 6.9, 6.7, 6.5, 6.3, 6.1 or 5.9. In one example, modified IFN-β polypeptides provided herein can contain one or more modification that cause a decrease in the pI of the modified IFN-β polypeptide by about 0.55 or 0.5 compared to an unmodified IFN-β polypeptide.

[0428] Using the methods described herein, the following is-HIT positions were identified that contribute to decreasing the isoelectric point of IFN-β: 11, 45, 52, 105, 108, 113, 115, 124, 152, and 165, corresponding to amino acid positions of a mature IFN-β polypeptide set forth in SEQ ID NO:1. Amino acid modifications can occur at one or more of amino acid positions corresponding to any of positions R11, K45, K52, K105, K108, R113, K115, R124, R152, and R165 of a mature IFN-β polypeptide set forth in SEQ ID NO:1. In one example, modification of one or more amino acid residues of a Lysine (K) or an Arginine (R) to a Glutamine (Q) can contribute to a decrease in the pI of an IFN-β polypeptide by about 0.55 or 0.55. Table 13 provides non-limiting examples of amino acid modifications that increase conformational stability by contributing to a decrease in the isoelectric point by about 0.55 or 0.55 and, thereby, protein stability. In another example, modification of one or more amino acid residues of a Lysine (K) or an Arginine (R) to a Glutamic Acid (E) or an Aspartic Acid (D) can contribute to a decrease in the pI of an IFN-β polypeptide by about 0.2 or 0.2. Table 14 provides non-limiting examples of amino acid replacements that increase conformational stability by contributing to a decrease in the isoelectric point by about 0.2 or 0.2 and, thereby, protein stability. Generally, a resulting polypeptide retains one or more activities of the unmodified IFN-β polypeptide. In Tables 13 and 14 below, the sequence identifier (SEQ ID No.) is in parenthesis next to each substitution.

TABLE 13
Modification to decrease the pI about 0.55 or 0.55

| | |
|---|---|
| R11Q (281) | K115Q (56) |
| K45Q (159) | R124Q (230) |
| K52Q (169) | R152Q (256) |
| K105Q (194) | R165Q (252) |
| K108Q (200) | |
| R113Q (212) | |

[0429] TABLE 14
Modification to decrease the pI about 0.2 or 0.2

| | |
|---|---|
| R11D (145) | K115D (151) |
| K45D (146) | R124D (520) |
| K52D (147) | R124E (519) |
| K105D (148) | R152D (152) |
| K108D (149) | R165D (153) |
| R113E (150) | |

[0430] Modified IFN-β polypeptides provided herein that exhibit increased conformational stability due to a decreased isoelectric point can contain one or more amino acid modifications corresponding to any one or more modification of R11Q, R11D, K45Q, K45D, K52Q, K52D, K105Q, K105D, K108Q, K108D, R113Q, R113E, K115Q, K115D, R124Q, R124D, R124E, R152Q, R152D, R165Q, and R165D of a mature IFN-β polypeptide set forth in SEQ ID NO:1. In one example, modifications are in an unmodified IFN-β polypeptide having a sequence of amino acids set forth in SEQ ID NO:1 or SEQ ID NO:3. Exemplary modified IFN-β candidate LEAD polypeptides are set forth in any one of SEQ ID NOS: 56, 145-153, 159, 169, 194, 200, 212, 230, 252, 256, 281, 519, and 520.

[0431] In one example, a modified IFN-β polypeptide that exhibits increased conformational stability due to a decreased isoelectric point can contain one or more amino acid modifications compared to an unmodified IFN-β polypeptide corresponding to any one or more modifications of K45D, K52D, K105D, and K115D of a mature IFN-β polypeptide set forth in SEQ ID NO:1. Modifications can be in an unmodified IFN-β polypeptide having a sequence of amino acids set forth in SEQ ID NO:1 or SEQ ID NO:3. Additionally, a modified IFN-β as set forth above can contain a further modification. The further modification can be any one or more amino acid modifications corresponding to any one or more modification of R11Q, R11D, K45Q, K52Q, K105Q, K108Q, K108D, R113Q, R113E, K115Q, R124Q, R124D, R124E, R152Q, R152D, R165Q, and R165D of a mature IFN-β polypeptide set forth in SEQ ID NO:1. In another example, a modified IFN-β polypeptide that exhibits increased conformational stability due to a decreased isoelectric point can contain two or more amino acid modifications corresponding to any two or more modifications of R11Q, R11D, K45Q, K45D, K52Q, K52D, K105Q, K105D, K108Q, K108D, R113Q, R113E, K115Q, K115D, R124Q, R124D, R124E, R152Q, R152D, R165Q, and R165D of a mature IFN-β polypeptide set forth in SEQ ID NO:1. The unmodified IFN-β polypeptide can be an IFN-β polypeptide having a sequence of amino acids set forth in SEQ ID NO:1 or SEQ ID NO:3. Generally, any resulting polypeptide retains one or more activities of the unmodified IFN-β.

[0432] 3. SuperLeads

[0433] IFN-β superLEAD mutant polypeptides are a combination of single amino acid mutations present in two or more of the respective IFN-β LEAD mutant polypeptides as set forth above. Thus, IFN-β superLEAD mutant polypeptides have two or more of the single amino acid mutations derived from two or more of the respective IFN-β LEAD mutant polypeptides. As described above and in detail below, modified IFN-β polypeptides provided herein exhibit increased protein stability manifested as an increased resistance to proteolysis or as an increased conformational stability. Typically, IFN-β LEAD mutant polypeptides created are those whose performance has been optimized with respect to the unmodified polypeptide by modification of a single amino acid replacement at one is-HIT position. IFN-β SuperLead polypeptides are created such that the polypeptide contains two or more IFN-β LEAD modifications, each at a different is-HIT position. In one example, an IFN-β polypeptide exhibiting improved protein stability can contain two or more modifications that are manifested as increased resistance to proteolysis. In another example, an IFN-β polypeptide exhibiting improved protein stability can contain two or more modifications that are manifested as increased conformational stability. Additionally, an IFN-β polypeptide that exhibits increased protein stability can contain any combination of modifications, such as one or more modifications manifested as increased resistance to proteases and one or more modifications manifested as increased conformational stability. Once the LEAD mutant polypeptides have been identified using, for example, 2D-scanning methods, superLEADs can be generated by combining two or more individual LEAD mutant mutations using methods well known in the art, such as recombination, mutagenesis and DNA shuffling, and by methods such as additive directional mutagenesis and multi-overlapped primer extensions.

[0434] Exemplary modified IFN-β Super-LEAD polypeptides exhibiting increased protease stability can include IFN-β molecules containing two or more amino acid modifications compared to an unmodified IFN-β polypeptide. In some examples, an IFN-β polypeptide can contain 2, 3, 4, 5, 6, 7, 8, 9, 10, 11, 12, 13, 14, 15, 16, 17, 18, 19, 20, or more modified positions. Generally, the resulting IFN-β polypeptide exhibits increased protein stability and retains at least one activity of an unmodified IFN-β polypeptide. A modified IFN-β polypeptide can include any two or more amino acid modifications set forth in Table 2 above. For example, the modified IFN-β polypeptide can contain two or more amino acid modifications corresponding to any two or more modifications of Y3I, Y3H, L6I, L6V, L6H, L6A, R11D, Q18H, Q18S, Q18T, Q18N, K19N, L20I, L20V, L20H, L20A, L21I, L21V, L21T, L21Q, L21H, L21A, Q23H, Q23S, Q23T, Q23N, L24I, L24V, L24T, L24Q, L24H, L24A, E29N, K33N, D34N, D34Q, D34G, F38I, F38V, D39N, P41A, P41S, E42N, E43K, E43Q, E43H, E43N, K45D, K45N, Q48H, Q48S, Q48T, Q48N, Q49H, Q49S, Q49T, Q49N, F50I, F50V, Q51H, Q51S, Q51T, Q51N, K52D, K52N, E53R, E53Q, E53H, E53N, D54G, L57I, L57V, L57T, L57Q, L57H, L57A, Y60H, Y60I, E61K, E61Q, E61H, E61N, M62I, M62V, M62T, M62Q, M62H, M62A, L63I, L63V, L63T, L63Q, L63H, L63A, Q64H, Q64S, Q64T, Q64N, F70I, F70V, Q72H, Q72S, Q72T, Q72N, D73N, W79H, W79S, E81K, E81N, E85K, E85N, L87I, L87V, L87H, L87A, L88I, L88V, L88T, L88Q, L88H, L88A, L98I, L98V, L98H, L98A, K99N, L102I, L102V, L102T, L102Q, L102H, L102A, E103K, E103N, E104R, E104N, K105D, K105N, L106I, L106V, L106T, L106Q, L106H, L106A, E107R, E107N, K108D, K108N, E109R, E109N, D110K, D110N, R113E, K115D, K115Q, K115N, K115S, K115H, M117I, M117V, M117T, M117Q, M117A, L122I, L122V, L122T, L122Q, L122H, L122A, K123N, R124D, R124E, Y125H, Y125I, Y126H, Y126I, Y132H, Y132I, L133I, L133V, L133T, L133Q, L133H, L133A, K134N, K136N, E137N, W143H, W143S, R147H, R147Q, E149Q, E149H, E149N, L151I, L151V, L151T, L151Q, L151H, L151A, R152D, F154I, F154V, F156I, F156V, L160I, L160V, L160T, L160Q, L160H, L160A, L164I, L164V, L164T, L164Q, L164H, L164A, and R165D of a mature IFN-β polypeptide set forth in SEQ ID NO:1. In another example, an IFN-β polypeptide can contain any two or more amino acid modifications set forth in Table 3 above, such as any two or more amino acid modifications corresponding to any two or more modifications of M1V, M1I, M1T, M1A, M1Q, M1D, M1E, M1K, M1N, M1R, M1S, M1C, L5V, L5I, L5T, L5Q, L5H, L5A, L5D, L5E, L5K, L5R, L5N, L5S, L6D, L6E, L6K, L6N, L6Q, L6R, L6S, L6T, L6T, L6C, F8I, F8V, F8D, F8E, F8K, F8R, L9V, L9I, L9T, L9Q, L9H, L9A, L9D, L9E, L9K, L9N, L9R, L9S, Q10D, Q10E, Q10K, Q10N, Q10R, Q10S, Q10T, Q10C, R11H, R11Q, S12D, S12E, S12K, S12R, S13D, S13E, S13K, S13N, S13Q, S13R, S13T, S13C, N14D, N14E, N14K, N14Q, N14R, N14S, N14T, F15I, F15V, F15D, F15E, F15K, F15R, Q16D, Q16E, Q16K, Q16N, Q16R, Q16S, Q16T, Q16C, C17D, C17E, C17K, C17N, C17R, C17S, C17T, K19Q, K19T, K19S, K19H, L20N, L20Q, L20R, L20S, L20T, L20D, L20E, L20K, W22S, W22H, W22D, W22E, W22K, W22R, Q23D, Q23E, Q23K, Q23R, L24D, L24E, L24K, L24R, N25H, N25S, N25Q, R27H, R27Q, L28V, L28I, L28T, L28Q, L28H, L28A, E29Q, E29H, Y30H, Y30I, L32V, L32I, L32T, L32Q, L32H, L32A, K33Q, K33T, K33S, K33H, R35H, R35Q, M36V, M36I, M36T, M36Q, M36A, D39Q, D39H, D39G, E42Q, E42H, K45Q, K45T, K45S, K45T, L47V, L47I, L47T, L47Q, L47H, L47A, K52Q, K52T, K52S, K52H, F67I, F67V, R71H, R71Q, D73Q, D73H, D73G, G78D, G78E, G78K, G78R, N80D, N80E, N80K, N80R, E81Q, E81H, T82D, T82E, T82K, T82R, I83D, I83E, I83K, I83R, I83N, I83Q, I83S, I83T, E85Q, E85H, N86D, N86E, N86K, N86R, N86Q, N86S, N86T, L87D, L87E, L87K, L87R, L87N, L87Q, L87S, L87T, A89D, A89E, A89K, A89R, N90D, N90E, N90K, N90Q, N90R, N90S, N90T, N90C, V91D, V91E, V91K, V91N, V91Q, V91R, V91S, V91T, V91C, Y92H, Y92I, Q94D, Q94E, Q94K, Q94N, Q94R, Q94S, Q94T, Q94C, I95D, I95E, I95K, I95N, I95Q, I95R, I95S, I95T, H97D, H97E, H97K, H97N, H97Q, H97R, H97S, H97T, H97C, L98D, L98E, L98K, L98N, L98Q, L98R, L98S, L98T, L98C, K99Q, K99T, K99S, K99H, V101D, V101E, V101K, V101N, V101Q, V101R, V101S, V101T, V101C, E103Q, E103H, E104Q, E104H, K105Q, K105T, K105S, K105H, E107 Q, E107H, K108Q, K108T, K108S, K108H, E109H, E109Q, D110Q, D110H, D110G, F111I, F111V, R113H, R113Q, L116V, L116I, L116T, L116Q, L116H, L116A, K123Q, K123T, K123S, K123H, R124H, R124Q, R128H, R128Q, L130V, L130I, L130T, L130Q, L130H, L130A, K134Q, K134T, K134S, K134H, K136Q, K136T, K136S, K136H, E137Q, E137H, Y138H, Y138I, R152H, R152Q, Y155H, Y155I, R159H, R159Q, Y163H, Y163I, R165H, and R165Q of a mature IFN-β polypeptide set forth in SEQ ID NO:1. In some examples, the modifications are in an unmodified IFN-β polypeptide having a sequence of amino acids set forth in SEQ ID NO:1 or 3. Also contemplated herein are any combination of IFN-β modifications set forth in Table 2 and Table 3. For example, an IFN-β polypeptide can contain one or more amino acid modifications compared to an unmodified IFN-β polypeptide set forth in Table 2 and/or set forth in Table 3.

[0435] In one non-limiting example, an IFN-β polypeptide can contain a modification at a position corresponding to L5 of a mature IFN-β polypeptide set forth in SEQ ID NO:1, and can contain a further amino acid modifications, such as any modification set forth in Table 2 or 3. In another example, an IFN-β polypeptide can contain a modification at a position corresponding to L6 of a mature IFN-β polypeptide set forth in SEQ ID NO:1, and can contain one or more further amino acid modification set forth in Table 2 or 3. Exemplary SuperLead IFN-β polypeptides are set forth in Table 15 with the sequence identifier (SEQ ID No.) in parenthesis next to each substitution. Resulting SuperLEADs can be tested for one or more parameters to assess protein stability (e.g., increased resistance to proteases and/or increased thermal tolerance using any of the assays described herein), such as is described in Examples 7-9. Provided herein are modified IFN-β Super-LEAD polypeptides containing two or more amino acid modifications and exhibiting increased protein stability having a sequence of amino acids set forth in any of SEQ ID NOS: 88-125.

TABLE 15
Exemplary amino acid modifications in IFN-β SuperLeads
that exhibit increased protein stability

| | | | | |
|---|---|---|---|---|
| L5D/L6E (88) | L5E/Q10D (89) | L5Q/M36I (90) | L6E/L47I (91) | L5E/K108S (92) |
| L5E/L6E (93) | L5D/Q10D (94) | L5N/M36I (95) | L6Q/L47I (96) | L5D/K108S (97) |
| L5N/L6E (98) | L5Q/Q10D (99) | L6E/M36I (100) | L5E/N86Q (101) | L5Q/K108S (102) |
| L5Q/L6E (103) | L5N/Q10D (104) | L6Q/M36I (105) | L5D/N86Q (106) | L5N/K108S (107) |
| L5D/L6Q (108) | L6E/Q10D (109) | L5E/L47I (110) | L5Q/N86Q (111) | L5E/L6Q (113) |
| L6Q/Q10D (114) | L5D/L47I (115) | L6Q/K108S (117) | L5N/L6Q (118) | L5E/M36I (119) |
| L5Q/L47I (120) | L6E/N86Q (121) | L5Q/L6Q (122) | L5D/M36I (123) | L5N/L47I (124) |
| L6Q/N86Q (125) | L6E/K108S (112) | L5N/N86Q (116) | | |

[0436] 4. Other Modifications

[0437] In addition to any one or more amino acid modifications provided herein, a modified IFN-β polypeptide also can contain one or more other modifications, including those known to those of skill in the art, such as PEGylation, hyperglycosylation, deimmunization and others (see e.g. published U.S. Application Nos. US-2005-0054052; U.S. Pat. Nos. 6,127,332, 6,531,122, and 4,588,585; and published International Application Nos. WO 2004/087753, WO 2004/031352, WO 2005/003157, WO 2006/020580, WO 00/68387, WO 98/48018, WO 98/03887, and EP 260350). Generally, the modification results in increased stability without losing at least one activity, such as antiviral activity. (i.e. retains at least one activity as defined herein) of an unmodified IFN-β polypeptide. For example, other further modifications in an IFN-β polypeptide include one or more additional amino acid modification and/or one or more chemical modifications. Such modifications include, but are not limited to, those that alter the immunogenicity, glycosylation, activity, or any other known property of an IFN-β polypeptide. In another example, chemical modifications include post-translational modifications of a protein, such as for example, glycosylation by a carbohydrate moiety; acylation; methylation; phosphorylation; sulfation; prenylation; Vitamin C-dependent modifications such as for example, proline and lysine hydroxylations and carboxy terminal amidation; Vitamin K-dependent modifications such as for example, carboxylation of glutamic acid residues (i.e. gla residue); and incorporation of selenium to form a selenocysteine. Other protein modifications of an IFN-β polypeptide include PEGylation. In addition, protein modifications also can include modification to facilitate the detection, purification, and assay development of a polypeptide, such as for example, modification of a polypeptide with a Sulfo-NHS-LC-biotin for covalent attachment to a primary amine on a protein, or other similar modification for florescent, non-isotopic, or radioactive labels. Exemplary further modifications in an IFN-β polypeptide are described below. Modified polypeptides that are conjugates and/or labeled also are provided. For example, provided herein are modified polypeptides that are conjugated to a PEG moiety or contain a carbohydrate moiety covalently linked to one or more glycosylation site on the polypeptide.

[0438] a. Immunogenicity

[0439] There are many instances where the efficacy of a therapeutic protein is limited by an unwanted immune reaction to the therapeutic protein. An immune response to a therapeutic protein, such as IFN-β, proceeds via the MHC class II peptide presentation pathway. Here, exogenous proteins are engulfed and processed for presentation in association with MHC class II molecules of the DR, DQ, or DP type. MHC class II molecules are expressed by professional antigen presenting cells (APCs), such as macrophages and dendritic cells, amongst others. Engagement of a MHC class II peptide complex by a cognate T-cell receptor on the surface of the T cell, together with the cross binding of certain other co-receptors, such as the CD4 molecule, can induce an activated state within the T cell. Activation leads to the release of cytokines, further activating other lymphocytes such as B cells to produce antibodies or activating T killer cells as a full cellular immune response.

[0440] The ability of a peptide (T cell epitope) to bind a given MHC class II molecule for presentation on the surface of an APC is dependent on a number of factors, most notably its primary sequence. This will influence both its propensity for proteolytic cleavage and also its affinity for binding within the peptide binding cleft of the MHC class II molecule. The MHC class II/peptide complex on the APC surface presents a binding face to a particular T cell receptor (TCR) able to recognize determinants provided both by exposed residues of the peptide and the MHC class II molecule.

[0441] The identification of potential T cell epitopes can be carried out according to methods known in the art (see e.g., WO 98/59244; WO 98/52976; WO 00/34317; and US 2005/0054052) and can be used to identify the binding propensity of IFN-β peptides to an MHC class II molecule.

[0442] Further modifications to a modified IFN-β provided herein can include modifications of at least one amino acid residue resulting in a substantial reduction in activity of or elimination of one or more potential T cell epitopes from the protein, i.e. deimmunization of the polypeptide. One or more amino acid modification at particular positions within any of the potential MHC class II ligands can result in a deimmunized IFN-β polypeptide with a reduced immunogenic potential when administered as a therapeutic to a host, such as for example, a human host.

[0443] Exemplary amino acid positions for modification of a T cell epitope, and thereby a deimmunized IFN-β polypeptide with a reduced immunogenic potential, include positions 3, 6, 8, 9, 10, 11, 12, 13, 14, 15, 16, 17, 18, 19, 20, 21, 22, 23, 24, 25, 26, 28, 29, 30, 31, 32, 33, 34, 35, 36, 37, 38, 39, 40, 42, 43, 44, 45, 46, 47, 48, 50, 51, 52, 53, 54, 55, 56, 57, 58, 60, 61, 62, 63, 64, 65, 66, 67, 68, 69, 70, 71, 72, 73, 74, 75, 76, 77, 78, 79, 80, 81, 82, 83, 84, 85, 86, 87, 88, 89, 90, 91, 92, 95, 98, 100, 101, 102, 103, 106, 104, 105, 106, 107, 108, 109, 110, 111, 112, 114, 116, 117, 118, 119, 120, 122, 123, 124, 125, 126, 127, 128, 129, 130, 132, 133, 134, 135, 136, 137, 138, 139, 140, 141, 143, 145, 146, 148, 150, 151, 152, 153, 154, 155, 156, 157, 158, 159, 160, 161, 162, and 164, corresponding to positions of a mature IFN-β polypeptide set forth in SEQ ID NO:1. Amino acid modifications can be at one or more position corresponding to any of the following positions: Y3, L6, F8, L9, Q10, R11, S12, S13, N14, F15, Q16, C17, Q18, K19, L20, L21, W22, Q23, L24, N25, G26, L28, E29, Y30, C31, L32, K33, D34, R35, M36, N37, F38, D39, I40, E42, E43, I44, K45, Q46, L47, Q48, F50, Q51, K52, E53, D54, A55, A56, L57, T58, Y60, E61, M62, L63, Q64, N65, I66, F67, A68, I69, F70, R71, Q72, D73, S74, S75, S76, T77, G78, W79, N80, E81, T82, I83, V84, E85, N86, L87, L88, A89, N90, V91, Y92, I95, L98, T100, V101, L102, E103, E104, K105, L106, E107, K108, E109, D110, F111, T112, G114, L116, M117, S118, S119, L120, L122, K123, R124, Y125, Y126, G127, R128, I129, L130, Y132, L133, K134, A135, K136, E137, Y138, S139, H140, C141, W143, I145, V146, V148, I150, L151, R152, N153, F154, Y155, F156, I157, N158, R159, L160, T161, G162, and L164 of a mature IFN-β polypeptide set forth in SEQ ID NO:1. Exemplary amino acid modifications that can contribute to reduced immunogenicity of an IFN-β polypeptide include any one or more amino acid modifications corresponding to any one or more modification of Y3A, Y3C, Y3D, Y3E, Y3G, Y3H, Y3K, Y3N, Y3P, Y3Q, Y3R, Y3S, Y3T, L6N, L6P, L6Q, L6R, L6S, L6T, L6A, L6C, L6D, L6E, L6F, L6G, L6H, L6I, L6K, L6V, L6W, L6Y, F8A, F8C, F8D, F8E, F8G, F8H, F8K, F8N, F8P, F8Q, F8R, F8S, F8T, L9A, L9C, L9D, L9E, L9G, L9H, L9K, L9N, L9N, L9P, L9Q, L9R, L9S, L9T, L9F, L9I, L9M, L9V, L9W, L9Y, Q10A, Q10C, Q10G, Q10I, Q10P, R11A, R11C, R11G, R11P, S12P, S12T, S13A, S13C, S13G, S13P, N14D, N14H, N14P, F15A, F15C, F15D, F15E, F16G, F15H, F15K, F15N, F15P, F15Q, F15R, F15S, F15T, F15M, F15W, F15Y, Q16A, Q16C, Q16G, Q16P, C17D, C17E, C17H, C17K, C17N, C17P, C17Q, C17R, C17S, C17T, Q18H, Q18P, Q18T, K19A, K19C, K19G, L20A, L20C, L20D, L20E, L20G, L20H, L20K, L20N, L20P, L20Q, L20R, L20S, L20T, L20W, L20Y, L21A, L21C, L21D, L21E, L21G, L21H, L21K, L21N, L21P, L21Q, L21R, L21S, L21T, L21M, L21W, L21Y, W22A W22C, W22D, W22E, W22G, W22H, W22K, W22N, W22P, W22Q, W22R, W22S, W22T, Q23H, Q23P, Q23T, L24A, L24C, L24D, L24E, L24G, L24H, L24K, L24N, L24P, L24Q, L24R, L24S, L24T, L24F, L24I, L24M, L24V, L24W, L24Y, N25A, N25C, N25G, N25P, G26H, G26T, L28A, L28C, L28D, L28E, L28G, L28H, L28K, L28N, L28N, L28P, L28Q, L28R, L28S, L28T, L28F, L28I, L28M, L28V, L28W, L28Y E29A, E29C, E29G, E29H, E29P, E29W, Y30A, Y30C, Y30D, Y30E, Y30G, Y30H, Y30K, Y30N, Y30P, Y30Q, Y30R, Y30S Y30T, Y30M, C31D, C31E, C31H, C31K, C31N, C31P, C31Q, C31R, C31S, C31T, L32A, L32C, L32D, L32E, L32G, L32H, L32K, L32N, L32P, L32Q, L32R, L32S, L32F, L32I, L32M, L32V, L32W, L32Y, K33A, K33C, K33G, K33H, K33P, K33T, D34A, D34C, D34G, D34P, D34T, R35A, R35C, R35H, R35P, R35T, M36A, M36C, M36D, M36E, M36G, M36H, M36K, M36N, M36P, M36Q, M36R, M36S, M36T, M36F, M36I, M36V, M36V, V36W, M36Y, N37A, N37C, N37G, N37H, N37P, N37W, F38A, F38C, F38D, F38E, F38G, F38H, F38K, F38N, F38P, F38Q, F38R, F38S, F38T, F38I, F38M, F38V, F38W, F38Y, D39A, D39C, D39G, D39P, I40A, I40C, I40D, I40E, I40G, I40H, I40K, I40N, I40P, I40Q, I40R, I40S, I40T, E42A, E42C, E42G, E42P, E43H, E43P, I44A, I44C, I44D, I44E, I44G, I44H, I44K, I44N, I44P, I44Q, I44R, I44S, I44T, I44M, I44W, K45A, K45C, K45G, K45P, Q46P, Q46T, L47A, L47C, L47D, L47E, L47G, L47H, L47K, L47N, L47P, L47Q, L47R, L47S, L47T, L47M, L47W, L47Y, Q48A, Q48C, Q48G, Q48P, F50A, F50C, F50D, F50E, F50G, F50H, F50K, F50N, F50P, F50Q, F50R, F50S, F50T, F50M, F50W, Q51A, Q51C, Q51G, Q51P, K52A, K52C, K52G, K52H, K52P, K52T, E53H, E53P, E53T, D54A, D54C, D54G, D54P, A55C, A55D, A55E, A55G, A55H, A55K, A55N, A55P, A55Q, A55R, A55S, A55T, A56D, A56E, A56G, A56H, A56K, A56N, A56P, A56Q, A56R, A56S, A56T, L57A, L57C, L57D, L57E, L57G, L57H, L57K, L57N, L57P, L57Q, L57R, L57S, L57T, L57M, L57V, L57W, L57Y, T58A, T58C, T58G, T58P, Y60A, Y60D, Y60E, Y60E, Y60G, Y60H, Y60K, Y60N, Y60P, Y60Q, Y60R, Y60S, Y60T, E61A, E61C, E61G, E61P, M62A, M62C, M62D, M62E, M62G, M62H, M62K, M62N, M62P, M62Q, M62R, M62S, M62T, M62W, M62Y, L63A, L63C, L63D, L63E, L63G, L63H, L63K, L63N, L63P, L63R, L63S, L63T, L63F, L63M, L63V, L63W, L63Y, Q64A, Q64C, Q64G, Q64P, N65H, N65P, N65T, I66A, I66C, I66D, I66E, I66G, I66H, I66K, I66N, I66P, I66Q, I66R, I66S, I66T, I66M, I66W, I66Y, F67A, F67C, F67D, F67E, F67G, F67H, F67K, F67N, F67P, F67Q, F67R, F67S, F67T, F67M, F67W, M67Y, A68D, A68E, A68F, A68H, A68K, A68N, A68P, A68Q, A68R, A68S, A68T, I69A, I69C, I69D, I69E, I69G, I69H, I69K, I169N, I69P, I69Q, I69R, I69S, I69T, I69M, F70A, F70C, F70D, F70E, F70G, F70H, F70K, F70N, F70P, F70Q, F70R, F70S, F70T, F70M, F70W, R71A, R71C, R71G, R71P, Q72A, Q72C, Q72G, Q72P, Q72T, D73A, D73C, D73G, D73P, D73T, S74A, S74C, S74G, S74P, S74T, S75P, S75T, S76A, S76C, S76G, S76P, T77A, T77C, T77G, T77P, G78D, G78E, G78H, G78K, G78N, G78P, G78Q, G78R, G78S, G78T, W79A, W79C, W79D, W79E, W79G, W79H, W79K, W79N, W79P, W79Q, W79R, W79S, W79T, N80A, N80C, N80G, N80P, E81A, E81C, E81G, E81P, T82P, I83A, I83C, I83D, I83E, I83G, I83H, I83K, I83N, I83P, I83Q, I83R, I83S, I83T, V84A, V84C, V84D, V84E, V84K, V84N, V84P, V84Q, V84R, V84S, V84T, B84L, V84M, V84W, V84Y, E85P, E85T, N86A, N86C, N86G, N86P, L87A, L87C, L87D, L87E, L87G, L87H, L87K, L87N, L87P, L87Q, L87R, L87S, L87T, L87F, L87I, L87M, L87V, L87W, L87Y, L88A, L88C, L88D, L88E, L88G, L88H, L88K, L88N, L88P, L88Q, L88R, L88R, L88S, L88T, A89H, A89P, N90T, V91A, V91C, V91D, V91E, V91G, V91H, V91K, V91N, V91P, V91Q, V91R, V91S, V91T, Y92A, Y92C, Y92D, Y92E, Y92G, Y92H, Y92K, Y92N, Y92P, Y92Q, Y92R, Y92S, Y92T, I95A, I95C, I95D, I95E, I95G, I95H, I95K, I95N, I95P, I95Q, I95R, I95S, I95T, L98A, L98C, L98D, L98E, L98G, L98H, L98K, L98N, L98P, L98Q, L98R, L98S, L98T, T100H, V101A, V101C, V101D, V101E, V101G, V101H, V101K, V101N, V101P, V101Q, V101R, V101S, V101T, L102A, L102C, L102D, L102E, L102G, L102H, L102K, L102N, L102P, L102R, L102S, L102T, L102I, L102M, L102V, L102W, L102Y, E103A, E103C, E102G, E103P, E103T, E104P, K105H, K105Q, K105S, K105T, L106A, L106C, L106D, L106E, L106G, L106H, L106K, L106N, L106P, L106Q, L106R, L106S, L106T, L106M, L106W, L106Y, E107H, K108H, K108N, K108Q, K108S, K108T, E109P, E109T, D110H, D110Q, D110S, D110T, F111A, F111C, F111D, F111E, F111G, F111H, F111K, F111N, F111P, F111Q, F111R, F111S, F111T, F111M, F111W, F111Y, T112A, T112C, T112G, T112P, G114H, G114K, G114N, G114P, G114Q, G114S, G114T, L116A, L116C, L116D, L116E, L116E, L116G, L116H, L116K, L116N, L116P, L116Q, L116R, L116S, L116T, L116F, L116I, L116M, L116V, L116W, L116Y, M117A, M117C, M117D, M117E, M117G, M117H, M117K, M117N, M117P, M117Q, M117R, M117S, M117T, S118A, S118C, S118G, S118P, S119P, S119T, L120A, L120C, L120D, L120E, L120G, L120H, L120K, L120N, L120P, L120Q, L120R, L120S, L120T, L120M, L120W, L120Y, L122A, L122C, L122D, L122E, L122G, L122H, L122K, L122N, L122P, L122Q, L122R, L122S, L122T, L122W, L122Y, K123A, K123C, K123G, K123P, K123T, R124A, R124C, R124G, R124P, R124T, Y125A, Y125C, Y125D, Y125E, Y125G, Y125H, Y125K, Y125N, Y125P, Y125Q, Y125R, Y125S, Y125T, Y126A, Y126C, Y126D, Y126E, Y126G, Y126H, Y126K, Y126N, Y126P, Y126Q, Y126R, Y126S, Y126T, G127P, R128H, R128P, R128T, I129A, I129C, I129D, I129E, I129G, I129H, I129K, I129N, I129P, I129Q, I129R, I129S, I129T, I129W, I129Y, L130A, L130C, L130D, L130E, L130G, L130H, L130K, L130N, L130P, L130R, L130S, L130T, L130W, L130Y, Y132A, Y132C, Y132D, Y132E, Y132G, Y132H, Y132K, Y132K, Y132N, Y132P, Y132Q, Y132R, Y132S, Y132T, L133A, L133C, L133D, L133E, L133G, L133H, L133K, L133N, L133P, L133Q, L133R, L133S, L133T, L133I, L133M, L133V, L133W, L133Y, K134A, K134C, K134G, K134H, K134P, A135C, A135G, A135H, A135K, A135N, A135P, A135Q, A135R, A135S, A135T, K136P, K136T, E137A, E137C, E137G, E137P, E137T, Y138A, Y138C, Y138D, Y138E, Y138G, Y138H, Y138K, Y138N, Y138P, Y138Q, Y138R, Y138S, Y138T, S139P, S139T, H140A, H140C, H140G, H140P, C141D, C141E, C141H, C141K, C141N, C141P, C141Q, C141R, C141S, C141T, W143A, W143C, W143D, W143E, W143G, W143H, W143K, W143N, W143P, W143Q, W143R, W143W, W143T, I145A, I145C, I145D, I145E, I145G, I145H, I145K, I145N, I145P, I145Q, I145R, I145S, I145T, I145W, V146A, V146C, V146D, V146E, V146G, V146H, V146K, V146N, V146P, V146Q, V146R, V146S, V146T, V148A, V148C, V148D, V148E, V148G, V148H, V148K, V148N, V148P, V148Q, V148R, V148S, V148T, V148I, V148L, V148W, V148Y, I150A, I150C, I150D, I150E, I150G, I150H, I150K, I150N, I150P, I150Q, I150R, I150S, I150T, L151A, L151C, L151D, L151E, L151G, L151H, L151K, L151N, L151P, L151Q, L151R, L151S, L151T, L151F, L151M, L151V, L151W, L151Y, R152A, R152C, R152G, R152P, R152W, R152Y, N153A, N153C, N153G, N153P, N153T, F154A, F154C, F154D, F154E, F154G, F154H, F154K, F154N, F154P, F154Q, F154R, F154S, F154T, F154M, Y155A, Y155C, Y155D, Y155E, Y155G, Y155H, Y155K, Y155N, Y155P, Y155Q, Y155R, Y155S, Y155T, F156A, F156D, F156E, F156G, F156H, F156K, F156N, F156P, F156Q, F156R, F156S, F156T, F156I, F156M, F156W, F156Y, I157T, N158A, N158C, N158F, N158G, N158I, N158L, N158M, N158P, N158V, N158W, N158Y, R159D, R159F, R159H, R159I, R159K, R159N, R159P, R159Q, R159S, R159T, R159V, R159W, R159Y, L160D, L160E, L160F, L160G, L160H, L160I, L160K, L160N, L160P, L160Q, L160R, L160S, L160T, L160Y, T161D, T161E, T161F, T161H, T161I, T161L, T161N, T161P, T161Q, T161S, T161V, T161W, T161Y, G162D, G162E, G162F, G162H, G162I, G162K, G162N, G162P, G162Q, G162R, G162S, G162T, G162V, G162W, G162Y, L164A, L164C, L164D, L164E, L164F, L164G, L164H, L164I, L164K, L164M, L164N, L164N, L164P, L164Q, L164R, L164S, L164T, L164V, L164W, and L164Y of a mature IFN-β polypeptide set forth in SEQ ID NO:1.

[0444] b. Glycosylation

[0445] Many proteins with therapeutic potential include one or more glycosylation sites, e.g., amino acid sequences that are glycosylated by a eukaryotic cell. There have been various reports of attempts to increase the degree of glycosylation of therapeutic proteins in order to achieve 1) reduced immunogenicity; 2) less frequent administration of the protein; 3) increased protein stability such as increased serum half-life; and 4) reduction in adverse side effects such as inflammation. The glycosylation site(s) provides a site for attachment of a carbohydrate moiety on the subject polypeptide, such that when the subject polypeptide is produced in a eukaryotic cell capable of glycosylation, the subject polypeptide is glycosylated. The further glycosylation of an IFN-β polypeptide confers one or more advantages including increased serum half-life; reduced immunogenicity; increased functional in vivo half-life; reduced degradation by gastrointestinal tract conditions such as gastrointestinal tract proteases; and increased rate of absorption by gut epithelial cells. An increased rate of absorption by gut epithelial cells and reduced degradation by gastrointestinal tract conditions is important for enteral (e.g. oral) formulations of an IFN-β polypeptide.

[0446] Glycosylation of proteins results in the formation of glycoproteins due to the covalent attachment of oligosaccharides to a polypeptide. The carbohydrate modifications found in glycoproteins are linked to the protein component through either O-glycosidic or N-glycosidic bonds. The predominant carbohydrate attachment in glycoproteins of mammalian cells is via N-glycosidic linkage. The N-glycosidic linkage is through the amide group of asparagines. The site of carbohydrate attachment to N-linked glycoproteins is found within a consensus sequence of amino acids, N—X—S/T, where X is any amino acid except proline. In N-linked glycosylation, the carbohydrate directly attached to the protein is GlcNAc. Since glycosylation is known to be highly host cell-dependent, the sugar chains associated with N-linked glycosylation of a protein can differ (Kagawa et al., (1988) JBC 263:17508-17515). The O-glycosidic linkage is to the hydroxyl of serine, threonine or hydroxyllysine. In Ser- and Thr-type O-linked glycoproteins, the carbohydrate directly attached to the protein is GalNAc. A number of O-linked glycosylation sites are known in the art and have been reported in the literature, see e.g. Ten Hagen et al. (1999) J. Biol. Chem., 274:27867-74; Hanisch et al. (2001) Glycobiology, 11:731-740; and Ten Hagen et al., (2003) Glycobiology, 13:1R-16R.

[0447] Modified IFN-β polypeptides provided herein can further be glycosylated (i.e. hyperglycosylated) compared to an unmodified IFN-β polypeptide due to 1) a carbohydrate moiety covalently linked to at least one non-native glycosylation site not found in the unmodified IFN-β protein or 2) a carbohydrate moiety covalently linked to at least one native glycosylating site found but not glycosylated in the unmodified IFN-β protein. A hyperglycosylated IFN-β polypeptide can include O-linked glycosylation, N-linked glycosylation, and/or a combination thereof. Addition of glycosylation sites to variant IFN-β molecules can be accomplished by, for example, the incorporation of one or more serine or threonine residues to the native sequence or modified IFN-β polypeptide (for O-linked glycosylation sites) or by incorporation of a canonical N-linked glycosylation site, including but not limited to, N—X—Y, where X is any amino acid except for proline and Y is typically serine, threonine, or cysteine. In some examples, a hyperglycosylated IFN-β polypeptide can include 1, 2, 3, 4, or 5 carbohydrate moieties, each linked to different glycosylation sites. The glycosylation site can be a native glycosylation site. In other examples, the hyperglycosylated polypeptide can be glycosylated at a single non-native glycosylation site. In still other examples, the hyperglycosylated polypeptide can be glycosylated at more than one non-native glycosylation site, e.g., the hyperglycosylated IFN-β polypeptide can be glycosylated at 2, 3, or 4 non-native glycosylation sites.

[0448] In some instances, a hyperglycosylated IFN-β polypeptide is glycosylated at a native glycosylation site. For example, IFN-β, such as for example human IFN-β having an amino acid sequence set forth in SEQ ID NO:1, contains a single N-linked glycosylation site at residue N80 (Hosoi et al., (1988) J Interferon Res, 8: 375-84). The IFN-β polypeptide can be glycosylated at a single native glycosylation site, or at more than one native glycosylation site, e.g., at 2, 3, or 4 native glycosylation sites. A hyperglycosylated IFN-β polypeptide also can be glycosylated at both a native glycosylation site and a non-native glycosylation site.

[0449] Modified IFN-β polypeptide provided herein can have at least one additional carbohydrate moiety not found in the unmodified IFN-β polypeptide when each is synthesized in a eukaryotic cell that is capable of N- and/or O-linked protein glycosylation. Thus, e.g., compared to an unmodified IFN-β polypeptide, a hyperglycosylated modified IFN-β polypeptide can have at least 1, at least 2, at least 3, at least 4, or more, additional carbohydrate moieties. For example, where an unmodified IFN-β polypeptide has one covalently linked carbohydrate moiety, a hyperglycosylated IFN-β polypeptide can have 2, 3, 4, or more covalently linked carbohydrate moieties. In some examples, a hyperglycosylated IFN-β polypeptide of a modified IFN-β polypeptide provided herein, lacks a carbohydrate moiety covalently linked to a non-native glycosylation site, and has instead at least 1, at least 2, at least 3, or at least 4, or more additional carbohydrate moieties attached to native glycosylation sites. In other examples, a hyperglycosylated IFN-β polypeptide lacks a carbohydrate moiety covalently linked to a native glycosylation site, and has instead at least 2, at least 3, or at least 4, or more carbohydrate moieties attached to non-native glycosylation sites.

[0450] Whether a subject IFN-β polypeptide has N-linked and/or O-linked glycosylation is readily determined using standard techniques, see e.g., “Techniques in Glycobiology” R. Townsend and A. Hotchkiss, eds. (1997) Marcel Dekker; and “Glycoanalysis Protocols (Methods in Molecular Biology, Vol. 76)” E. Hounsell, ed. (1998) Humana Press. The change in electrophoretic mobility of a protein before and after treatment with chemical or enzymatic deglycosylation (e.g., using endoglycosidases and/or exoglycosidases) is routinely used to determine the glycosylation status of a protein. Enzymatic deglycosylation can be carried out using any of a variety of enzymes, including, but not limited to, peptide-N4-(N-acetyl-β-D-glycosaminyl) asparagine amidase (PNGase F); endoglycosidase F1, endoglycosidase F2, endoglycosidase F3, α(2→3,6,8,9) neuraminidase, and the like. For example, sodium docecyl sulfate-polyacrylamide gel electrophoresis (SDS-PAGE) analysis of the protein, either pre-treated with PNGase F or untreated with PNGaseF, is conducted. A marked decrease in band width and change in migration position after treatment with PNGaseF is considered diagnostic of N-linked glycosylation. The carbohydrate content of a glycosylated protein also can be detected using lectin analysis of protein blots (e.g., proteins separated by SDS-PAGE and transferred to a support, such as a nylon membrane). Lectins, carbohydrate binding proteins from various plant tissues, have both high affinity and narrow specificity for a wide range of defined sugar epitopes found on glycoprotein glycans (Cummings (1994) Methods in Enzymol. 230:66-86). Lectins can be detectably labeled (either directly or indirectly), allowing detection of binding of lectins to carbohydrates on glycosylated proteins. For example, when conjugated with biotin or digoxigenin, a lectin bound to a glycosylated protein can be easily identified on membrane blots through a reaction utilizing avidin or anti-digoxigenin antibodies conjugated with an enzyme such as alkaline phosphatase, β-galactosidase, luciferase, or horse radish peroxidase, to yield a detectable product. Screening with a panel of lectins with well-defined specificity provides considerable information about a glycoprotein's carbohydrate complement.

[0451] Exemplary amino acid positions contemplated herein for modification of a glycosylation site, for attachment of a carbohydrate moiety, include positions corresponding to positions 74, 109, and 111 of a mature IFN-β polypeptide set forth in SEQ ID NO:1. Amino acid replacement or replacements can correspond to any of the following positions: S74, E109, and F11 of mature IFN-β. In a particular embodiment, the amino acid replacement or replacements contributing to hyperglycosylation of modified IFN-β polypeptides is (are) replacement of amino acids by asparagines (N) or threonine (T). Thus, provided herein are modified IFN-β polypeptides containing a further modification corresponding to any one or more of S74N, S74T, E109N, E109T, F111N, and F11T of a mature IFN-β polypeptide set forth in SEQ ID NO:1

[0452] In one example, an exemplary hyperglycosylation modification in an IFN-β polypeptide, such as a modified IFN-β polypeptide provided herein, is (a) an amino acid modification corresponding to S74N of a mature IFN-β polypeptide; and (b) a carbohydrate moiety covalently attached to the R-group of the asparagine (N) residue.

[0453] In some examples, a hyperglycosylation modification in a modified IFN-β polypeptide provided herein can be (a) amino acid modifications corresponding to S74N and E109N of a mature IFN-β polypeptide; and (b) a carbohydrate moiety covalently attached to the R-group of each of the asparagine (N) residues. In an additional example, a hyperglycosylation modification in a modified IFN-β polypeptide provided herein can be (a) an amino acid modification corresponding to S74N, E109N, and F111T of a mature IFN-β polypeptide; and (b) a carbohydrate moiety covalently attached to the R-group of each of the asparagine (N) residues.

[0454] Additional hyperglycosylation modifications in an IFN-β polypeptide include (a) an amino acid modification corresponding to E109N of a mature IFN-β polypeptide; and (b) a carbohydrate moiety covalently attached to the R-group of the asparagine residue. In additional examples, a hyperglycosylation modification in a modified IFN-β polypeptide provided herein can be (a) an amino acid modification corresponding to E109N and F111T of a mature IFN-β polypeptide; and (b) a carbohydrate moiety covalently attached to the R-group of the asparagine residue.

[0455] Hyperglycosylation modifications in an IFN-β polypeptide also can include (a) an amino acid modification corresponding to E109T of a mature IFN-β polypeptide; and (b) a carbohydrate moiety covalently attached to the R-group of the threonine residue. In some examples, amino acid modifications in a modified IFN-β polypeptide provided herein can include amino acid modifications corresponding to S74N and E109T of a mature IFN-β; and (b) a carbohydrate moiety covalently attached to the R-group of the asparagine and threonine residues.

[0456] c. Additional Modifications

[0457] Additional modifications of polypeptides provided herein include chemical derivatization of polypeptides, including but not limited to, acetylation and carboxylation; changes in amino acid sequence that make the protein susceptible to PEGylation or other modification. A modified IFN-β polypeptide provided herein can be modified with one or more polyethylene glycol moieties (PEGylated). In some instances, a modified IFN-β polypeptide provided herein can contain one or more non-naturally occurring pegylation sites that are engineered to provide PEG-derivatized polypeptides with reduced serum clearance. Also contemplated are sequences that have phosphorylated amino acid residues, e.g. phosphotyrosine, phosphoserine, or phosphothreonine.

[0458] Other suitable additional modifications of a modified IFN-β polypeptide provided herein are polypeptides that have been modified using ordinary chemical techniques so as to improve their resistance to proteolytic degradation, to optimize solubility properties, or to render them more suitable as a therapeutic agent. For example, the backbone of the peptide can be cyclized to enhance stability (see e.g., Friedler et al. (2000) J. Biol. Chem. 275:23783-23789). Analogs can be used that include residues other than naturally occurring L-amino acids, e.g., D-amino acids or non-naturally occurring synthetic amino acids. The protein can be pegylated to enhance stability.

### E. PRODUCTION OF IFN-β POLYPEPTIDES

[0459] 1. Polypeptide Expression

[0460] IFN-β polypeptides can be produced by any methods known in the art for protein production, including the introduction of nucleic acid molecules encoding IFN-β into a host cell, host animal and expression from nucleic acid molecules encoding IFN-β in vitro. Expression hosts include E. coli, yeast, plants, insect cells, mammalian cells, including human cell lines and transgenic animals. Expression hosts can differ in their protein production levels as well as the types of post-translational modifications that are present on the expressed proteins. The choice of expression host can be made based on these and other factors, such as regulatory and safety considerations, production costs and the need and methods for purification. Components of a therapeutic complex need not all be expressed in the same host.

[0461] Expression in eukaryotic hosts can include expression in yeasts such as Saccharomyces cerevisae and Picchia Pastoria, insect cells such as Drosophila cells and lepidopteran cells, plants and plant cells such as tobacco, corn, rice, algae and lemna. Eukaryotic cells for expression also include mammalian cells lines such as Chinese hamster ovary (CHO) cells. Eukaryotic expression hosts also include production in transgenic animals, for example, including production in milk and eggs.

[0462] Many expression vectors are available for the expression of IFN-β. The choice of expression vector will be influenced by the choice of host expression system. In general, expression vectors can include transcriptional promoters and optionally enhancers, translational signals, and transcriptional and translational termination signals. Expression vectors that are used for stable transformation typically have a selectable marker which allows selection and maintenance of the transformed cells. In some cases, an origin of replication can be used to amplify the copy number of the vector.

[0463] a. Prokaryotes

[0464] Prokaryotes, especially E. coli, provide a system for producing large amounts of IFN-β (see for example, Platis et al. Protein Exp. Purif. 31(2):222-30 (2003); and Khalizzadeh et al. J. Ind. Microbiol. Biotechnol. 31(2): 63-69 (2004)). Transformation of E. coli is simple and rapid technique well known to those of skill in the art. Expression vectors for E. coli can contain inducible promoters, such promoters are useful for inducing high levels of protein expression and for expressing proteins that exhibit some toxicity to the host cells. Examples of inducible promoters include the lac promoter, the trp promoter, the hybrid tac promoter, the T7 and SP6 RNA promoters and the temperature regulated λP_{L} promoter.

[0465] IFN-β can be expressed in the cytoplasmic environment of E. coli. The cytoplasm is a reducing environment and for some molecules, this can result in the formation of insoluble inclusion bodies. Reducing agents such as dithiothreotol and β-mercaptoethanol and denaturants, such as guanidine-HCl and urea, can be used to resolubilize the proteins. An alternative approach is the expression of IFN-β in the periplasmic space of bacteria which provides an oxidizing environment and chaperonin-like and disulfide isomerases which lead to the production of soluble protein. Typically, a leader sequence is fused to the protein to be expressed which directs the protein to the periplasm. The leader is then removed by signal peptidases inside the periplasm. Examples of periplasmic-targeting leader sequences include the pelB leader from the pectate lyase gene and the leader derived from the alkaline phosphatase gene. In some cases, periplasmic expression allows leakage of the expressed protein into the culture medium. The secretion of proteins allows quick and simple purification from the culture supernatant. Proteins that are not secreted can be obtained from the periplasm by osmotic lysis. Similar to cytoplasmic expression, in some cases proteins can become insoluble and denaturants and reducing agents can be used to facilitate solubilization and refolding. Temperature of induction and growth also can influence expression levels and solubility, typically temperatures between 25° C. and 37° C. are used. Mutations also can be used to increase solubility of expressed proteins. Typically, bacteria produce aglycosylated proteins. Thus, if proteins require glycosylation for function, glycosylation can be added in vitro after purification from host cells.

[0466] b. Yeast

[0467] Yeasts such as Saccharomyces cerevisae, Schizosaccharomyces pombe, Yarrowia lipolytica, Kluyveromyces lactis and Pichia pastoris are useful expression hosts for IFN-β (see for example, Skoko et al. Biotechnol. Appl. Biochem. 38(Pt3): 257-65 (2003)). Yeast can be transformed with episomal replicating vectors or by stable chromosomal integration by homologous recombination. Typically, inducible promoters are used to regulate gene expression. Example of such promoters include GAL1, GAL7 and GAL5 and metallothionein promoters such as CUP1. Expression vectors often include a selectable marker such as LEU2, TRP1, HIS3 and URA3 for selection and maintenance of the transformed DNA. Proteins expressed in yeast are often soluble. Co-expression with chaperonins such as Bip and protein disulfide isomerase can improve expression levels and solubility. Additionally, proteins expressed in yeast can be directed for secretion using secretion signal peptide fusions such as the yeast mating type alpha-factor secretion signal from Saccharomyces cerevisae and fusions with yeast cell surface proteins such as the Aga2p mating adhesion receptor or the Arxula adeninivorans glucoamylase. A protease cleavage site such as for the Kex-2 protease, can be engineered to remove the fused sequences from the expressed therapeutic components and complexes as they exit the secretion pathway. Yeast also is capable of glycosylation at Asn-X-Ser/Thr motifs.

[0468] c. Insects and Insect Cells

[0469] Insects and insect cells, particularly using baculovirus expression, are useful for expressing interferons including IFN-β (see, for example, Muneta et al. J. Vet. Med. Sci. 65(2): 219-23 (2003)). Insect cells and insect larvae, including expression in the haemolymph, express high levels of protein and are capable of most of the post-translational modifications used by higher eukaryotes. Baculovirus have a restrictive host range which improves the safety and reduces regulatory concerns of eukaryotic expression. Typical expression vectors use a promoter for high level expression such as the polyhedrin promoter of baculovirus. Commonly used baculovirus systems include the baculoviruses such as Autographa californica nuclear polyhedrosis virus (AcNPV), and the bombyx mori nuclear polyhedrosis virus (BmNPV) and an insect cell line such as Sf9 derived from Spodoptera frugiperda, Pseudaletia unipuncta (A7S) and Danaus plexippus (DpN1). For high level expression, the nucleotide sequence of the molecule to be expressed is fused immediately downstream of the polyhedrin initiation codon of the virus. Mammalian secretion signals are accurately processed in insect cells and can be used to secrete the expressed protein into the culture medium. In addition, the cell lines Pseudaletia unipuncta (A7S) and Danaus plexippus (DpN1) produce proteins with glycosylation patterns similar to mammalian cell systems.

[0470] An alternative expression system in insect cells is the use of stably transformed cells. Cell lines such as the Schnieder 2 (S2) and Kc cells (Drosophila melanogaster) and C7 cells (Aedes albopictus) can be used for expression. The Drosophila metallothionein promoter can be used to induce high levels of expression in the presence of heavy metal induction with cadmium or copper. Expression vectors are typically maintained by the use of selectable markers such as neomycin and hygromycin.

[0471] d. Mammalian Cells

[0472] Mammalian expression systems can be used to express components of the therapeutic complexes and the complexes. Expression constructs can be transferred to mammalian cells by viral infection such as adenovirus or by direct DNA transfer such as liposomes, calcium phosphate, DEAE-dextran and by physical means such as electroporation and microinjection. Expression vectors for mammalian cells typically include an mRNA cap site, a TATA box, a translational initiation sequence (Kozak consensus sequence) and polyadenylation elements. Such vectors often include transcriptional promoter-enhancers for high level expression, for example the SV40 promoter-enhancer, the human cytomegalovirus (CMV) promoter and the long terminal repeat of Rous sarcoma virus (RSV). These promoter-enhancers are active in many cell types. Tissue and cell-type promoters and enhancer regions also can be used for expression. Exemplary promoter/enhancer regions include, but are not limited to those from genes such as elastase I, insulin, immunoglobulin, mouse mammary tumor virus, albumin, alpha-fetoprotein, alpha 1-antitrypsin, beta-globin, myelin basic protein, myosin light chain-2, and gonadotropic releasing hormone gene control. Selectable markers can be used to select for and maintain cells with the expression construct. Examples of selectable marker genes include, but are not limited to hygromycin B phosphotransferase, adenosine deaminase, xanthine-guanine phosphoribosyl transferase, aminoglycoside phosphotransferase, dihydrofolate reductase and thymidine kinase. Fusion with cell surface signaling molecules such as TCR-ζ and Fc_{ε}RI-γ can direct expression of the proteins in an active state on the cell surface.

[0473] Many cell lines are available for mammalian expression including mouse, rat human, monkey, chicken and hamster cells. Exemplary cell lines include but are not limited to CHO, Balb/3T3, Hela, MT2, mouse NSO (non-secreting) and other myeloma cell lines, hybridoma and heterohybridoma cell lines, lymphocytes, fibroblasts, Sp2/0, COS, NIH3T3, HEK293, 293S, 2B8, and HKB cells. Cell lines also are available adapted to serum-free media which facilitates purification of secreted proteins from the cell culture media. One such example is the serum-free EBNA-1 cell line (Pham et al., Biotechnol. Bioeng. 84: 332-42 (2003)).

[0474] e. Plants

[0475] Transgenic plant cells and plants can be used for the expression of IFN-β. Expression constructs are typically transferred to plants using direct DNA transfer such as microprojectile bombardment and PEG-mediated transfer into protoplasts, and with agrobacterium-mediated transformation. Expression vectors can include promoter and enhancer sequences, transcriptional termination elements and translational control elements. Expression vectors and transformation techniques are usually divided between dicot hosts, such as Arabidopsis and tobacco, and monocot hosts, such as corn and rice. Examples of plant promoters used for expression include the cauliflower mosaic virus promoter, the nopaline syntase promoter, the ribose bisphosphate carboxylase promoter and the ubiquitin and UBQ3 promoters. Selectable markers such as hygromycin, phosphmannose isomerase and neomycin phosphotransferase are often used to facilitate selection and maintenance of transformed cells. Transformed plant cells can be maintained in culture as cells, aggregates (callus tissue) or regenerated into whole plants. Transgenic plant cells also can include algae engineered to produce proteins (see for example, Mayfield et al. PNAS 100: 438-442 (2003)). Because plants have different glycosylation patterns than mammalian cells, this can influence the choice to produce IFN-β in these hosts.

[0476] 2. Purification

[0477] Method for purification of IFN-β polypeptides from host cells will depend on the chosen host cells and expression systems. For secreted molecules, proteins are generally purified from the culture media after removing the cells. For intracellular expression, cells can be lysed and the proteins purified from the extract. When transgenic organisms such as transgenic plants and animals are used for expression, tissues or organs can be used as starting material to make a lysed cell extract. Additionally, transgenic animal production can include the production of polypeptides in milk or eggs, which can be collected, and if necessary the proteins can be extracted and further purified using standard methods in the art.

[0478] IFN-β can be purified using standard protein purification techniques known in the art including but not limited to, SDS-PAGE, size fraction and size exclusion chromatography, ammonium sulfate precipitation and ionic exchange chromatography. Affinity purification techniques also can be utilized to improve the efficiency and purity of the preparations. For example, antibodies, receptors and other molecules that bind IFN-β can be used in affinity purification. Expression constructs also can be engineered to add an affinity tag to a protein such as a myc epitope, GST fusion or His₆ and affinity purified with myc antibody, glutathione resin and Ni-resin, respectively. Purity can be assessed by any method known in the art including gel electrophoresis and staining and spectrophotometric techniques.

[0479] 3. Fusion Proteins

[0480] Fusion proteins containing a targeting agent and a modified IFN-β protein also are provided. Pharmaceutical compositions containing such fusion proteins formulated for administration by a suitable route are provided. Fusion proteins are formed by linking in any order the modified IFN-β and an agent, such as an antibody or fragment thereof, growth factor, receptor, ligand and other such agent for directing the mutant protein to a targeted cell or tissue. Linkage can be effected directly or indirectly via a linker. The fusion proteins can be produced recombinantly or chemically by chemical linkage, such as via heterobifunctional agents or thiol linkages or other such linkages. The fusion proteins can contain additional components, such as E. coli maltose binding protein (MBP) that aid in uptake of the protein by cells (see, International PCT application No. WO 01/32711).

[0481] 4. Polypeptide Modification

[0482] Modified IFN-β polypeptides can be prepared as naked polypeptide chains or as a complex. For some applications, it can be desirable to prepare modified IFN-β in a “naked” form without post-translational or other chemical modifications. Naked polypeptide chains can be prepared in suitable hosts that do not post-translationally modify IFN-β. Polypeptides also can be prepared in in vitro systems and using chemical polypeptide synthesis. For other applications, particular modifications can be desired including pegylation, albumination, glycosylation, phosphorylation or other known modifications. Such modifications can be made in vitro or for example, by producing the modified IFN-β is a suitable host that produces such modifications.

[0483] 5. Nucleotide Sequences

[0484] Nucleic acid molecules encoding modified IFN-β proteins, provided herein, or the fusion protein operably-linked to a promoter, such as an inducible promoter for expression in mammalian cells also are provided. Such promoters include, but are not limited to, CMV and SV40 promoters; adenovirus promoters, such as the E2 gene promoter, which is responsive to the HPV E7 oncoprotein; a PV promoter, such as the PBV p89 promoter that is responsive to the PV E2 protein; and other promoters that are activated by the HIV or PV or oncogenes.

[0485] Modified IFN-β proteins provided herein, also can be delivered to the cells in gene transfer vectors. The transfer vectors also can encode additional other therapeutic agent(s) for treatment of the disease or disorder, such cancer or HIV infection, for which the modified IFN-β is administered. Transfer vectors encoding modified IFN-β can be used systemically, by administering the nucleic acid to a subject. For example, the transfer vector can be a viral vector, such as an adenovirus vector. Vectors encoding IFN-β also can be incorporated into stem cells and such stem cells administered to a subject such as by transplanting or engrafting the stem cells at sites for therapy. For example, mesenchymal stem cells (MSCs) can be engineered to express a modified IFN-β and such MSCs engrafted at a tumor site for therapy.

### F. ASSESSING MODIFIED IFN-β POLYPEPTIDE ACTIVITY(IES)

[0486] IFN-β activity can be assessed in vitro and/or in vivo. In one example, IFN-β variants can be assessed in comparison to unmodified and/or wild-type IFN-β. In other examples, a modified IFN-β polypeptide can be assessed for biological activity following in vitro or in vivo exposure to protein stability-altering conditions (i.e. exposure to proteases, or denaturing agents such as temperature or pH). In vitro assays include any laboratory assay known to one of skill in the art, such as for example, cell-based assays including proliferation assays, protein assays, and molecular biology assays. In vivo assays include IFN-β assays in animal models as well as administration to humans. In some cases, activity of IFN-β in vivo can be determined by assessing blood, serum, or other bodily fluid for assay determinants. Examples of assays to assess biological activity can be found in Fellous et al. (1982) Proc. Natl. Acad. Sci. USA 79:3082-3086; Czerniecki et al. (1984) J. Virol. 49(2):490-496; Mark et al. (1984) Proc. Natl. Acad. Sci. USA 81:5662-5666; Branca et al. (981) Nature 277:221-223; Williams et al. (1979) Nature 282:582-586; Herberman et al. (1979) Nature 277:221-223; Anderson et al. (1982) J. Biol. Chem. 257(19):11301-11304; or as described herein.

[0487] 1. Anti-Viral Assays

[0488] Anti-viral activity of IFN-β can be determined by assessing the ability of IFN-β to protect cells from virus-induced cytopathic effects. Such a viral resistance assay can assay protection of cells including but not limited to Hela cells, A549 cells, a human “Wish” cell line, monkey VERO cells, or others. Typically, viruses that are routinely used to induce cytopathic affects include EMC (mouse encephalomyocarditis) virus or VSV virus. In one example, serial dilutions of IFN-β can be added to plated HeLa cells. After 24 hours of growth, a 1/1000 EMC virus dilution solution can be placed in each well, except for a cell only control row. After 48 hours of incubation, treated, infected cells can be stained with a cellular viability dye, such as for example Trypan Blue, to determine the proportion of intact cells. The cell-bound dye can be extracted and the absorbance of the dye can be measured such as by using an absorbance reader or an ELISA plate reader. The anti-viral activity of IFN-β can be depicted as the concentration of IFN-β needed for 50% protection of the cells against EMC virus-induced cytopathic effects (i.e., EC₅₀ average).

[0489] In some examples, the unmodified, wild-type IFN-β or modified IFN-β can be exposed to conditions that affect protein stability, such as for example, exposure to proteases, temperature or pH. The exposure can occur in vitro or in vivo. For example, a modified IFN-β polypeptide can be preincubated with a protease cocktail for increasing amounts of time, followed by quenching of the protease activity such as with EDTA. The protease-treated IFN-β can then be tested for its anti-viral activity in the assay described above to determine if it exhibits residual biological activity following protease treatment. In another example, the pharmacokinetics of a modified or unmodified IFN-β polypeptide can be assessed to determine if in vivo conditions affect the biological activity of an IFN-β polypeptide. In vivo conditions that can affect protein stability include temperature (i.e. such as at 37° C.), pH changes, exposure to proteases, etc. For example, unmodified wild-type IFN-β or modified IFN-β polypeptides can be administered by injection (intravenous, subcutaneous, oral, etc. . . . ) of an animal or human. Blood samples can be drawn over time. Serial dilutions of the collected plasma can be added to HeLa cells to assess for protection of cytopathic effects following infection with ECMV.

[0490] 2. Cell Proliferation Assays

[0491] Anti-proliferative activity of IFN-β can be determined by assessing the capacity of wildtype or modified IFN-β to inhibit proliferation of Daudi cells (ATCC) using cell proliferation assays known to one of skill in the art. For example, serial dilutions of modified or unmodified IFN-β can be added to plated Daudi cells. After 72 hours of growth, the proliferation of the cells can be assessed such as for example by any standard method to assess proliferation, e.g., tritium incorporation, trypan blue staining, Cell titer 96® Aqueous one solution reagent (Promega), or others. The EC₅₀ value can be determined as the concentration of IFN-β necessary to give one-half the maximum response (see e.g., Examples 5 and 9).

[0492] 3. Natural Killer Cell Activation

[0493] Activation of Natural Killer (NK) cell can be assessed following incubation with unmodified or modified IFN-β. Lymphocytes, such as human peripheral blood lymphocytes isolated on a Ficoll/Hypaque gradient, can be treated with an IFN-β. Following incubation, such as overnight, the lymphocytes can be mixed at a 50:1 ratio with target cells (i.e. Daudi cells labeled with chromium). Killing of the target cells can be assessed by measuring the chromium in the supernatant using a γ-counter. Percent release or killing can be calculated as a ratio of the measured radioactivity (cpm) in an IFN-β test sample compared to total radioactivity.

[0494] 4. Measuring Markers of IFN-β Activity

[0495] IFN-β activity can be assessed by measuring specific IFN-β-induced protein markers that have been demonstrated to peak after in vitro stimulation of cells or in vivo injection of IFN-β (e.g., Bertolotto et al., (2004) J of Neurology Neurosurgery and Psychiatry, 75:1294-1299). Examples of protein markers induced by IFN-β include, but are not limited to, myxovirus resistance protein A (MxA), 2′-5′ oligoadenylate synthetase (OAS), and β2-microglobulin. Measurement of a protein marker from a cell extract, conditioned medium, blood, serum, or other source can be determined by Western Blot, ELISA, or other similar assays known to one of skill in the art. In some examples, the measurement of a specific transcript offers a better measure of biological activity since mRNA has a shorter half-life than protein. For example, PCR methods such as quantitative PCR or real-time PCR (RT-PCR) can be used to measure the induction of markers by IFN-β. In one example, MxA mRNA can be measured using quantitative-competitive PCR. Such an assay allows the determination and analysis of fluctuations of MxA expression over time, such as during treatment with IFN-β or a modified IFN-β. For example, blood samples can be obtained from animals or human patients who received treatment with a modified IFN-β to obtain a population of peripheral blood mononuclear cells (PBMCs). Using standard recombinant DNA techniques, total RNA can be extracted from the cells, cDNA prepared, and a qc-PCR reaction set up with two competitor cDNA fragments (e.g., co-MxA and co-glyceraldehyde phosphate dehydrogenase (GAPDH)). The amplified PCR products can be resolved and visualized following separation by agarose gel electrophoresis. The ratios between competitors and target cDNA can be evaluated as ratios between band values, taking as ratio=1 an amount of starting targets (MxA or GAPDH) equal to the amount of each competitor. The MxA mRNA levels can be normalized using GAPDH as a housekeeping gene to avoid differences due to possible RNA degradation/contamination or different reverse transcription efficiency.

[0496] 5. Non-Human Animal Models

[0497] Non-human animal models are useful tools to assess activity and stability of IFN-β variants. For example, non-human animals can be used as models for a disease or condition. Non-human animals can be injected with disease and/or phenotype-inducing substances and then IFN-β variants administered to monitor the effects on disease progression. Genetic models also are useful. Animals such as mice can be generated which mimic a disease or condition by the overexpression, underexpression or knock-out of one or more genes. Such animals can be generated by transgenic animal production techniques well-known in the art or using naturally-occurring or induced mutant strains. Examples of useful non-human animal models of diseases associated with IFN-β activities include, but are not limited to, collagen-induced arthritis (CIA) mouse model of rheumatoid arthritis (Van Holten et al., (2004) Arthritis Research & Therapy, 6:239-249), experimental autoimmune encephalomyelitis (EAE) animal model of multiple sclerosis (Schmidt et al., (2001), J Neurosci Res. 65:59-67), animal models of cancer and angiogenesis such as malignant mesothelioma (Odaka et al., (2001) Experimental Therapeutics, 61:6201-6212), neuroblastoma (Streck et al., (2005), Cancer Lett. 228:163-70), and human xenografts tumors in ex vivo and in vivo models (Qin et al., (2001) Mol Ther, 4:356-64).

[0498] Animal models can further be used to monitor protein stability, half-life and clearance of IFN-β variants. Such assays can be useful for comparing IFN-β variants and for calculating doses and dose regimens for further non-human animal and human trials. For example, a modified IFN-β can be injected into the tail vein of mice. Blood samples can be taken at time-points after injection (such as minutes, hours and days afterwards) and then the level of the IFN-β variant in bodily samples including, but not limited to serum or plasma can be monitored at specific time-points, for example, by ELISA or radioimmunoassay.

### G. FORMULATION/PACKAGING/ADMINISTRATION

[0499] Pharmaceutical compositions containing a modified cytokine produced herein, including IFN-β variant (modified) polypeptides, modified IFN-β fusion proteins or encoding nucleic acid molecules, can be formulated in any conventional manner by mixing a selected amount of the polypeptide with one or more physiologically acceptable carriers or excipients. Selection of the carrier or excipient is within the skill of the administering profession and can depend upon a number of parameters. These include, for example, the mode of administration (i.e., systemic, oral, nasal, pulmonary, local, topical or any other mode) and disorder treated. The pharmaceutical compositions provided herein can be formulated for single dosage (direct) administration or for dilution or other modification. The concentrations of the compounds in the formulations are effective for delivery of an amount, upon administration, that is effective for the intended treatment. Typically, the compositions are formulated for single dosage administration. To formulate a composition, the weight fraction of a compound or mixture thereof is dissolved, suspended, dispersed or otherwise mixed in a selected vehicle at an effective concentration such that the treated condition is relieved or ameliorated. Pharmaceutical carriers or vehicles suitable for administration of the compounds provided herein include any such carriers known to those skilled in the art to be suitable for the particular mode of administration.

[0500] 1. Administration of Modified IFN-β Polypeptides

[0501] The polypeptides can be formulated as the sole pharmaceutically active ingredient in the composition or can be combined with other active ingredients. The polypeptides can be targeted for delivery, such as by conjugation to a targeting agent, such as an antibody. Liposomal suspensions, including tissue-targeted liposomes, also can be suitable as pharmaceutically acceptable carriers. These can be prepared according to methods known to those skilled in the art. For example, liposome formulations can be prepared as described in U.S. Pat. No. 4,522,811. Liposomal delivery also can include slow release formulations, including pharmaceutical matrices such as collagen gels and liposomes modified with fibronectin (see, for example, Weiner et al. (1985) J Pharm Sci. 74(9): 922-5).

[0502] The active compound is included in the pharmaceutically acceptable carrier in an amount sufficient to exert a therapeutically useful effect in the absence of undesirable side effects on the subject treated. The therapeutically effective concentration can be determined empirically by testing the compounds in known in vitro and in vivo systems, such as the assays provided herein. The active compounds can be administered by any appropriate route, for example, orally, nasally, pulmonary, parenterally, intravenously, intradermally, intramuscularly, subcutaneously, or topically, in liquid, semi-liquid or solid form and are formulated in a manner suitable for each route of administration.

[0503] The modified IFN-β and physiologically acceptable salts and solvates can be formulated for administration by injection. For administration by inhalation, the modified IFN-β can be delivered in the form of a liquid or powder. In the case of a liquid, the modified polypeptides can be injected from a syringe or an auto-injector. In the case of a powder, the modified polypeptides can be reconstituted with a pharmaceutically acceptable excipient, such as pharmaceutically-acceptable saline, prior to administration. Administration can be by a medical professional or self-administration.

[0504] The modified IFN-β and physiologically acceptable salts and solvates can be formulated for administration by inhalation (either through the mouth or the nose), oral, transdermal, pulmonary, parenteral or rectal administration. For administration by inhalation, the modified IFN-β can be delivered in the form of an aerosol spray presentation from pressurized packs or a nebulizer with the use of a suitable propellant, e.g., dichlorodifluoromethane, trichlorofluoromethane, dichlorotetrafluoroethane, carbon dioxide or other suitable gas. In the case of a pressurized aerosol, the dosage unit can be determined by providing a valve to deliver a metered amount. Capsules and cartridges of e.g., gelatin for use in an inhaler or insufflator, can be formulated containing a powder mix of a therapeutic compound and a suitable powder base such as lactose or starch.

[0505] For pulmonary administration to the lungs, the modified IFN-β can be delivered in the form of an aerosol spray presentation from a nebulizer, turbonebulizer, or microprocessor-controlled metered dose oral inhaler with the use of a suitable propellant. Generally, particle size is small, such as in the range of 0.5 to 5 microns. In the case of a pharmaceutical composition formulated for pulmonary administration, detergent surfactants are not typically used. Pulmonary drug delivery is a promising non-invasive method of systemic administration. The lungs represent an attractive route for drug delivery, mainly due to the high surface area for absorption, thin alveolar epithelium, extensive vascularization, lack of hepatic first-pass metabolism, and relatively low metabolic activity.

[0506] The modified IFN-β polypeptides can be formulated as a depot preparation. Such long-acting formulations can be administered by implantation (for example, subcutaneously or intramuscularly) or by intramuscular injection. Thus, for example, the therapeutic compounds can be formulated with suitable polymeric or hydrophobic materials (for example as an emulsion in an acceptable oil) or ion exchange resins, or as sparingly soluble derivatives, for example, as a sparingly soluble salt.

[0507] The modified IFN-β can be formulated for parenteral administration by injection (e.g., by bolus injection or continuous infusion). Formulations for injection can be presented in unit dosage form (e.g., in ampoules or in multi-dose containers) with an added preservative. The compositions can take such forms as suspensions, solutions or emulsions in oily or aqueous vehicles and can contain formulatory agents such as suspending, stabilizing and/or dispersing agents. Alternatively, the active ingredient can be in powder-lyophilized form for constitution with a suitable vehicle, e.g., sterile pyrogen-free water, before use.

[0508] Preparations for oral administration can be formulated for controlled release of the active compound. For buccal administration the compositions can take the form of tablets or lozenges formulated in conventional manner.

[0509] The pharmaceutical compositions can be formulated for local or topical application, such as for topical application to the skin (transdermal) and mucous membranes, such as in the eye, in the form of gels, creams, and lotions and for application to the eye or for intracisternal or intraspinal application. Such solutions, particularly those intended for ophthalmic use, can be formulated as 0.01%-10% isotonic solutions and pH about 5-7 with appropriate salts. The compounds can be formulated as aerosols for topical application, such as by inhalation (see, for example, U.S. Pat. Nos. 4,044,126, 4,414,209 and 4,364,923, which describe aerosols for delivery of a steroid useful for treatment inflammatory diseases, particularly asthma).

[0510] The concentration of active compound in the drug composition depends on absorption, inactivation and excretion rates of the active compound, the dosage schedule, and amount administered as well as other factors known to those of skill in the art. As described further herein, dosages can be determined empirically using dosages known in the art for administration of unmodified interferon-β, and comparisons of properties and activities (e.g., stability and biological activity) of the modified IFN-β compared to the unmodified and/or native IFN-β.

[0511] The compositions, if desired, can be presented in a package, in a kit or dispenser device, that can contain one or more unit dosage forms containing the active ingredient. The package, for example, contains metal or plastic foil, such as a blister pack. The pack or dispenser device can be accompanied by instructions for administration. The compositions containing the active agents can be packaged as articles of manufacture containing packaging material, an agent provided herein, and a label that indicates the disorder for which the agent is provided.

[0512] a. Oral Administration

[0513] Among the modified IFN-β polypeptides provided herein are IFN-βs modified to increase protein stability to conditions amendable to oral delivery. Oral delivery can include administration to the mouth and/or gastrointestinal tract. Such modifications can include increased protein-half life under one or more conditions such as exposure to saliva, exposure to proteases in the gastrointestinal tract, exposure to increased temperature, and exposure to particular pH conditions, such as the low pH of the stomach and/or pH conditions in the intestine. For example, modifications can include resistance to one or more proteases including pepsin, chymotrypsin, elastase, aminopeptidase, gelatinase B, gelatinase A, α-chymotrypsin, carboxypeptidase, endoproteinase Arg-C, endoproteinase Asp-N, endoproteinase Glu-C, endoproteinase Lys-C, trypsin, luminal pepsin, microvillar endopeptidase, dipeptidyl peptidase, enteropeptidase, hydrolase, NS3, elastase, factor Xa, Granzyme B, thrombin, plasmin, urokinase, tPA and PSA. Modifications also can include increasing overall stability to potentially denaturing or conformation-altering conditions such as tolerance to temperature, and tolerance to mixing and aeration (e.g., chewing).

[0514] IFN-β polypeptides modified for suitability to oral delivery can be prepared using any of the methods described herein. For example, 2D- and 3D-scanning mutagenesis methods for protein rational evolution (see, co-pending U.S. application Ser. No. 10/658,355 and U.S. Published Application No. US-2004-0132977-A1 and published International applications WO 2004022593 and WO 2004022747) can be used to prepare modified cytokines. Modification of IFN-β polypeptides for suitability for oral delivery can include removal of proteolytic digestion sites in a cytokine and/or increasing the overall stability of the cytokine structure. Such modified IFN-β polypeptides exhibit increased protein half-life compared to an unmodified and/or wild-type native IFN-β polypeptide in one or more conditions for oral delivery. For example, a modified IFN-β polypeptide can have increased protein half-life and/or bioavailability in the mouth, throat (e.g., through the mucosal lining), the gastrointestinal tract or systemically.

[0515] The half-life in vitro or in vivo (protein stability) of the modified IFN-β polypeptides provided herein can be increased by an amount selected from at least about or at least 1%, at least 5%, 10%, at least 20%, at least 30%, at least 40%, at least 50%, at least 60%, at least 70%, at least 80%, at least 90%, at least 100%, at least 150%, at least 200%, at least 250%, at least 300%, at least 350%, at least 400%, at least 450%, at least 500% or more, when compared to the half-life of an unmodified or wild-type IFN-β exposed to one or more conditions (i.e. proteases, pH, temperature) for oral delivery. In other embodiments, the half-life in vitro or in vivo (protein stability) of the modified cytokines provided herein is increased by an amount selected from at least 6 times, 7 times, 8 times, 9 times, 10 times, 20 times, 30 times, 40 times, 50 times, 60 times, 70 times, 80 times, 90 times, 100 times, 200 times, 300 times, 400 times, 500 times, 600 times, 700 times, 800 times, 900 times, 1000 times, or more, when compared to the half-life of an unmodified or wild-type IFN-β exposed to one or more conditions for oral delivery (i.e. proteases, pH, temperature).

[0516] In one example, half-life in vitro or in vivo (protein stability) of the modified IFN-β cytokine is assessed by increased half-life in the presence of one or more proteases. Proteases include, but are not limited to, proteases in blood, serum, the gastrointestinal tract, and the stomach. For example, proteases include, but are not limited to, pepsin, trypsin, chymotrypsin, elastase, aminopeptidase, gelatinase B, gelatinase A, α-chymotrypsin, carboxypeptidase, endoproteinase Arg-C, endoproteinase Asp-N, endoproteinase Glu-C, endoproteinase Lys-C, luminal pepsin, microvillar endopeptidase, dipeptidyl peptidase, enteropeptidase, hydrolase, NS3, factor Xa, Granzyme B, thrombin, plasmin, urokinase, tPA and PSA. Exemplary modified IFN-β polypeptides provided herein include IFN-β polypeptides modified by mutation of gelatinase B substrate recognition sites for decreased proteolysis by gelatinase B. To assess protease resistance, modified IFN-β polypeptides can be mixed with one or more proteases and then assayed for biological activity and/or protein structure after a suitable reaction time. In one embodiment, the modified polypeptide is at least 5%, 10%, 15%, 20%, 25%, 30%, 35%, 40%, 45%, 50%, 55%, 60%, 65%, 70%, 75%, 80%, 85%, 90%, 95%, 96%, 97%, 98%, 99%, or 100% more resistant to proteolysis.

[0517] Assessment of half-life also can include exposure to increased temperature, such as the body temperature of a subject; exposure to gastric juices and/or simulated gastric juices; exposure to particular pH conditions and/or a combination of two or more conditions. Following exposure to one or more conditions, biological activity and/or assessment of protein structure can be used to assess the half-life of the modified cytokine in comparison to an appropriate control (i.e., an unmodified and/or wild-type cytokine protein), such as is described herein.

[0518] The modified IFN-β polypeptides can be formulated for oral administration or delivery. Oral administration include tablets, capsules, liquids and other suitable vehicle for oral administration. The capsules or tablets can be formulated with an enteric coating to render them more gastro-resistant than in the absence thereof. Preparation of pharmaceutical compositions containing a modified IFN-β for oral delivery can include formulating modified cytokines with oral formulations known in the art and described herein. The compositions as formulated do not require addition of protease inhibitors and/or other ingredients that for stabilization of unmodified and wild-type cytokines upon exposure of proteases, pH and other conditions of oral delivery. For example, such compositions do not require addition of proteases, such as actinonin or epiactinonin and derivatives thereof; Bowman-Birk inhibitor and conjugates thereof; aprotinin and camostat. In other examples, the preparations for oral administration can be formulated with the use of protease inhibitors.

[0519] The IFN-β polypeptides can be formulated for mucosal delivery, including oral-mucosal delivery. Mucosal delivery, in which the composition is contacted with the mucosa, such as oral mucosa and delivered to the bloodstream substantially by-passing the gastrointestinal tract, is distinct from oral delivery in which the composition passes through the gastrointestinal tract.

[0520] Additionally, because modified IFN-β polypeptides provided herein exhibit increased protein stability, there is more flexibility in the administration of pharmaceutical compositions than their unmodified counterparts. For example, orally ingested IFN-β polypeptides are administered in the morning before eating (i.e., before digestive enzymes are activated). The modified IFN-β polypeptides herein exhibit protease resistance to digestive enzymes and can be administered any other time during the day and under conditions when digestive enzymes are present and active.

[0521] For oral administration, the pharmaceutical compositions can take the form of, for example, tablets and/or capsules, which prepared by conventional means with pharmaceutically acceptable excipients such as binding agents (e.g., pre-gelatinized maize starch, polyvinylpyrrolidone or hydroxypropyl methylcellulose); fillers (e.g., lactose, microcrystalline cellulose or calcium hydrogen phosphate); lubricants (e.g., magnesium stearate, talc or silica); disintegrants (e.g., potato starch or sodium starch glycolate); or wetting agents (e.g., sodium lauryl sulphate). The active ingredient present in the capsule can be in, for example, liquid or lyophilized form. The tablets or capsules can be coated by methods well known in the art. Tablets and capsules can be coated, for example, with an enteric coating. Liquid preparations for oral administration can take the form of, for example, solutions, syrups or suspensions, or they can be presented as a dry product for constitution with water or other suitable vehicle before use. Such liquid preparations can be prepared by conventional means with pharmaceutically acceptable additives such as suspending agents (e.g., sorbitol syrup, cellulose derivatives or hydrogenated edible fats); emulsifying agents (e.g., lecithin or acacia); non aqueous vehicles (e.g., almond oil, oily esters, ethyl alcohol or fractionated vegetable oils); and preservatives (e.g., methyl or propyl-p hydroxybenzoates or sorbic acid). The preparations also can contain buffer salts, flavoring, coloring and/or sweetening agents as appropriate.

[0522] The compositions for oral administration can be formulated, for example, as gastro-resistant capsules or tablets. Such gastro-resistant capsules are modified release capsules that are intended to resist the gastric fluid and to release their active ingredient or ingredients in the intestinal fluid. They are prepared by providing hard or soft capsules with a gastro-resistant shell (enteric capsules) or by filling capsules with granules or with particles covered with a gastro-resistant coating.

[0523] The enteric coating is typically, although not necessarily, a polymeric material. Enteric coating materials contain bioerodible, gradually hydrolyzable and/or gradually water-soluble polymers. The “coating weight,” or relative amount of coating material per capsule, generally dictates the time interval between ingestion and drug release. Any coating should be applied to a sufficient thickness such that the entire coating does not dissolve in the gastrointestinal fluids at pH below about 5, but does dissolve at pH about 5 and above. It is expected that any anionic polymer exhibiting a pH-dependent solubility profile can be used as an enteric coating to achieve delivery of the active ingredient to the lower gastrointestinal tract. The selection of the specific enteric coating material will depend on the following properties: resistance to dissolution and disintegration in the stomach; impermeability to gastric fluids and drug/carrier/enzyme while in the stomach; ability to dissolve or disintegrate rapidly at the target intestine site; physical and chemical stability during storage; non-toxicity; ease of application as a coating (substrate friendly); and economical practicality.

[0524] Suitable enteric coating materials include, but are not limited to: cellulosic polymers, such as hydroxypropyl cellulose, hydroxyethyl cellulose, hydroxypropyl methyl cellulose, methyl cellulose, ethyl cellulose, cellulose acetate, cellulose acetate phthalate, cellulose acetate trimellitate, hydroxypropylmethyl cellulose phthalate, hydroxypropylmethyl cellulose succinate and carboxymethylcellulose sodium; acrylic acid polymers and copolymers, such as those formed from acrylic acid, met acrylic acid, methyl acrylate, ammonium methylacrylate, ethyl acrylate, methyl methacrylate and/or ethyl methacrylate (e.g., those copolymers sold under the trade name EUDRAGIT); vinyl polymers and copolymers, such as polyvinyl pyrrolidone (PVP), polyvinyl acetate, polyvinyl acetate phthalate, vinyl acetate crotonic acid copolymer, and ethylene-vinyl acetate copolymers; and shellac (purified lac). Combinations of different coating materials also can be used to coat a single capsule. Exemplary of such gastro-resistant capsules are hard gelatin capsules (sold by Torpac or Capsugel) size 9, coated with cellulose acetate phthalate (CAP) at 12% in acetone.

[0525] The enteric coating provides for controlled release of the active agent, such that drug release can be accomplished at some generally predictable location in the lower intestinal tract below the point at which drug release would occur without the enteric coating. The enteric coating also prevents exposure of the hydrophilic therapeutic agent and carrier to the epithelial and mucosal tissue of the buccal cavity, pharynx, esophagus, and stomach, and to the enzymes associated with these tissues. The enteric coating therefore helps to protect the active agent and a patient's internal tissue from any adverse event prior to drug release at the desired site of delivery. Furthermore, the coated capsules can permit optimization of drug absorption, active agent protection, and safety. Multiple enteric coatings targeted to release the active agent at various regions in the lower gastrointestinal tract would enable even more effective and sustained improved delivery throughout the lower gastrointestinal tract.

[0526] The coating can contain a plasticizer to prevent the formation of pores and cracks that would permit the penetration of the gastric fluids. Suitable plasticizers include, but are not limited to, triethyl citrate (CITROFLEX 2), triacetin (glyceryl triacetate), acetyl triethyl citrate (CITROFLEC A2), CARBOWAX 400 (polyethylene glycol 400), diethyl phthalate, tributyl citrate, acetylated monoglycerides, glycerol, fatty acid esters, propylene glycol, and dibutyl phthalate. In particular, a coating containing an anionic carboxylic acrylic polymer will typically contain less than about 50% by weight, generally less than about 30% by weight, and typically, about 10% to about 25% by weight, based on the total weight of the coating, of a plasticizer, particularly dibutyl phthalate, polyethylene glycol, triethyl citrate and triacetin. The coating also can contain other coating excipients, such as detackifiers, antifoaming agents, lubricants (e.g., magnesium stearate), and stabilizers (e.g., hydroxypropylcellulose, acids and bases) to solubilize or disperse the coating material, and to improve coating performance and the coated product.

[0527] The coating can be applied to the capsule or tablet using conventional coating methods and equipment. For example, an enteric coating is applied to a capsule using a coating pan, an airless spray technique, fluidized bed coating equipment, or the like. Detailed information concerning materials, equipment and processes for preparing coated dosage forms can be found in Pharmaceutical Dosage Forms: Tablets, eds. Lieberman et al. (New York: Marcel Dekker, Inc., 1989), and in Ansel et al., Pharmaceutical Dosage Forms and Drug Delivery Systems, 6^{th} Edition (Media, Pa.: Williams & Wilkins, 1995). The coating thickness, as noted above, must be sufficient to ensure that the oral dosage form remains intact until the desired site of topical delivery in the lower intestinal tract is reached.

[0528] Preparations for oral administration can be formulated to give controlled or sustained release or for release after passage through the stomach or in the small intestine of the active compound. For oral administration the compositions can take the form of tablets, capsules, liquids, lozenges and other forms suitable for oral administration Formulations suitable for oral administration include lozenges and other formulations that deliver the pharmaceutical composition to the mucosa of the mouth, throat and/or gastrointestinal tract. Lozenges can be formulated with suitable ingredients including excipients for example, anhydrous crystalline maltose and magnesium stearate. As noted, modified cytokines herein exhibit resistance to blood or intestinal proteases and can exhibit increased half-life in the gastrointestinal tract. Thus, preparations of oral administration can be suitably formulated without additional protease inhibitors or other protective compounds, such as a Bowman-Birk inhibitor, a conjugated Bowman-Birk inhibitor, aprotinin and camostat. Preparations for oral administration also can include a modified cytokine resistance to proteolysis formulated with one or more additional ingredients that also confer proteases resistance, or stability in other conditions such as particular pH conditions.

[0529] 2. Administration of Nucleic Acids Encoding Modified IFN-β Polypeptides (Gene Therapy)

[0530] Also provided are compositions of nucleic acid molecules encoding the IFN-β polypeptides and expression vectors encoding them that are suitable for gene therapy. Rather than deliver the protein, nucleic acid can be administered in vivo under, such as systemically or by other route, or ex vivo, such as by removal of cells, including lymphocytes, introduction of the nucleic acid therein, and reintroduction into the host or a compatible recipient.

[0531] IFN-β polypeptides can be delivered to cells and tissues by expression of nucleic acid molecules. IFN-β polypeptides can be administered as nucleic acid molecules encoding IFN-β polypeptides, including ex vivo techniques and direct in vivo expression. Nucleic acids can be delivered to cells and tissues by any method known to those of skill in the art. The isolated nucleic acid can be incorporated into vectors for further manipulation.

[0532] Methods for administering IFN-β polypeptides by expression of encoding nucleic acid molecules include administration of recombinant vectors. The vector can be designed to remain episomal, such as by inclusion of an origin of replication or can be designed to integrate into a chromosome in the cell. IFN-β polypeptides also can be used in ex vivo gene expression therapy using non-viral vectors. For example, cells can be engineered to express an IFN-β polypeptide, such as by integrating an IFN-β polypeptide encoding-nucleic acid into a genomic location, either operatively linked to regulatory sequences or such that it is placed operatively linked to regulatory sequences in a genomic location. Such cells then can be administered locally or systemically to a subject, such as a patient in need of treatment.

[0533] Viral vectors, include, for example adenoviruses, herpes viruses, retroviruses and others designed for gene therapy can be employed. The vectors can remain episomal or can integrate into chromosomes of the treated subject. An IFN-β polypeptide can be expressed by a virus, which is administered to a subject in need of treatment. Virus vectors suitable for gene therapy include adenovirus, adeno-associated virus, retroviruses, lentiviruses and others noted above. For example, adenovirus expression technology is well-known in the art and adenovirus production and administration methods also are well known. Adenovirus serotypes are available, for example, from the American Type Culture Collection (ATCC, Rockville, Md.). Adenovirus can be used ex vivo, for example, cells are isolated from a patient in need of treatment, and transduced with an IFN-β polypeptide-expressing adenovirus vector. After a suitable culturing period, the transduced cells are administered to a subject, locally and/or systemically. Alternatively, IFN-β polypeptide-expressing adenovirus particles are isolated and formulated in a pharmaceutically-acceptable carrier for delivery of a therapeutically effective amount to prevent, treat or ameliorate a disease or condition of a subject. Typically, adenovirus particles are delivered at a dose ranging from 1 particle to 1014 particles per kilogram subject weight, generally between 106 or 108 particles to 1012 particles per kilogram subject weight. In some situations it is desirable to provide a nucleic acid source with an agent that targets cells, such as an antibody specific for a cell surface membrane protein or a target cell, or a ligand for a receptor on a target cell. Polynucleotides and expression vectors provided herein can be made by any suitable method. Further provided are nucleic acid vectors containing nucleic acid molecules as described above. Exemplary nucleic acid molecules have a sequence of nucleotides that encodes the polypeptide as set forth in any of SEQ ID NOS: 4-512, 519, 520, 534-659 or a biologically active fragment thereof. Further provided are nucleic acid vectors containing nucleic acid molecules as described above and cells containing these vectors.

[0534] The nucleic acid molecules can be introduced into artificial chromosomes and other non-viral vectors. Artificial chromosomes, such as ACES (see, Lindenbaum et al. Nucleic Acids Res. 2004 Dec. 7; 32(21):e172) can be engineered to encode and express the isoform. Briefly, mammalian artificial chromosomes (MACs) provide a means to introduce large payloads of genetic information into the cell in an autonomously replicating, non-integrating format. Unique among MACs, the mammalian satellite DNA-based Artificial Chromosome Expression (ACE) can be reproducibly generated de novo in cell lines of different species and readily purified from the host cells' chromosomes. Purified mammalian ACEs can then be re-introduced into a variety of recipient cell lines where they have been stably maintained for extended periods in the absence of selective pressure using an ACE System. Using this approach, specific loading of one or two gene targets has been achieved in LMTK(−) and CHO cells.

[0535] Another method for introducing nucleic acids encoding the modified IFN-β polypeptides is a two-step gene replacement technique in yeast, starting with a complete adenovirus genome (Ad2; Ketner et al. (1994) Proc. Natl. Acad. Sci. USA 91: 6186-6190) cloned in a Yeast Artificial Chromosome (YAC) and a plasmid containing adenovirus sequences to target a specific region in the YAC clone, an expression cassette for the gene of interest and a positive and negative selectable marker. YACs are of particular interest because they permit incorporation of larger genes. This approach can be used for construction of adenovirus-based vectors bearing nucleic acids encoding any of the described modified IFN-β polypeptides for gene transfer to mammalian cells or whole animals.

[0536] The nucleic acids can be encapsulated in a vehicle, such as a liposome, or introduced into a cell, such as a bacterial cell, particularly an attenuated bacterium or introduced into a viral vector. For example, when liposomes are employed, proteins that bind to a cell surface membrane protein associated with endocytosis can be used for targeting and/or to facilitate uptake, e.g., capsid proteins or fragments thereof tropic for a particular cell type, antibodies for proteins which undergo internalization in cycling, and proteins that target intracellular localization and enhance intracellular half-life.

[0537] For ex vivo and in vivo methods, nucleic acid molecules encoding the IFN-β polypeptide is introduced into cells that are from a suitable donor or the subject to be treated. Cells into which a nucleic acid can be introduced for purposes of therapy include, for example, any desired, available cell type appropriate for the disease or condition to be treated, including but not limited to epithelial cells, endothelial cells, keratinocytes, fibroblasts, muscle cells, hepatocytes; blood cells such as T lymphocytes, B lymphocytes, monocytes, macrophages, neutrophils, eosinophils, megakaryocytes, granulocytes; various stem or progenitor cells, in particular hematopoietic stem or progenitor cells, e.g., such as stem cells obtained from bone marrow, umbilical cord blood, peripheral blood, fetal liver, and other sources thereof.

[0538] For ex vivo treatment, cells from a donor compatible with the subject to be treated or the subject to be treated cells are removed, the nucleic acid is introduced into these isolated cells and the modified cells are administered to the subject. Treatment includes direct administration, such as, for example, encapsulated within porous membranes, which are implanted into the patient (see, e.g., U.S. Pat. Nos. 4,892,538 and 5,283,187). Techniques suitable for the transfer of nucleic acid into mammalian cells in vitro include the use of liposomes and cationic lipids (e.g., DOTMA, DOPE and DC-Chol) electroporation, microinjection, cell fusion, DEAE-dextran, and calcium phosphate precipitation methods. Methods of DNA delivery can be used to express IFN-β polypeptides in vivo. Such methods include liposome delivery of nucleic acids and naked DNA delivery, including local and systemic delivery such as using electroporation, ultrasound and calcium-phosphate delivery. Other techniques include microinjection, cell fusion, chromosome-mediated gene transfer, microcell-mediated gene transfer and spheroplast fusion.

[0539] In vivo expression of an IFN-β polypeptide can be linked to expression of additional molecules. For example, expression of an IFN-β polypeptide can be linked with expression of a cytotoxic product such as in an engineered virus or expressed in a cytotoxic virus. Such viruses can be targeted to a particular cell type that is a target for a therapeutic effect. The expressed IFN-β polypeptide can be used to enhance the cytotoxicity of the virus.

[0540] In vivo expression of a IFN-β polypeptide can include operatively linking an IFN-β polypeptide encoding nucleic acid molecule to specific regulatory sequences such as a cell-specific or tissue-specific promoter. IFN-β polypeptides also can be expressed from vectors that specifically infect and/or replicate in target cell types and/or tissues. Inducible promoters can be used to selectively regulate IFN-β polypeptide expression.

[0541] Nucleic acid molecules, as naked nucleic acids or in vectors, artificial chromosomes, liposomes and other vehicles can be administered to the subject by systemic administration, topical, local and other routes of administration. When systemic and in vivo, the nucleic acid molecule or vehicle containing the nucleic acid molecule can be targeted to a cell.

[0542] Administration also can be direct, such as by administration of a vector or cells that typically targets a cell or tissue. For example, tumor cells and proliferating cells can be targeted cells for in vivo expression of IFN-β polypeptides. Cells used for in vivo expression of an IFN-β polypeptide also include cells autologous to the patient. Such cells can be removed from a patient, nucleic acids for expression of an IFN-β polypeptide introduced, and then administered to a patient such as by injection or engraftment.

### H. THERAPEUTIC USES

[0543] The modified IFN-β polypeptides and nucleic acid molecules provided herein can be used for treatment of any condition for which unmodified IFN-β is employed. This section provides exemplary uses of and administration methods. These described therapies are exemplary and do not limit the applications of IFN-β.

[0544] The modified IFN-β polypeptides provided herein can be used in various therapeutic as well as diagnostic methods in which IFN-β is employed. Such methods include, but are not limited to, methods of treatment of physiological and medical conditions described and listed below. Modified IFN-β polypeptides provided herein can exhibit improvement of in vivo activities and therapeutic effects compared to wild-type IFN-β, including lower dosage to achieve the same effect, a more sustained therapeutic effect and other improvements in administration and treatment.

[0545] In particular, modified IFN-β polypeptides, are intended for use in therapeutic methods in which IFN-β has been used for treatment. Such methods include, but are not limited to, methods of treatment of infectious diseases, allergies, microbial diseases, pregnancy related diseases, bacterial diseases, heart diseases, viral diseases, histological diseases, genetic diseases, blood related diseases, fungal diseases, adrenal diseases, cancers, liver diseases, autoimmune diseases, growth disorders, diabetes, neurodegenerative diseases, including multiple sclerosis, Parkinson's disease and Alzheimer's disease.

[0546] Treatment of diseases and conditions with IFN-β variants can be effected by any suitable route of administration using suitable formulations as described herein including, but not limited to, subcutaneous injection, oral and transdermal administration. If necessary, a particular dosage and duration and treatment protocol can be empirically determined or extrapolated. For example, exemplary doses of recombinant and native IFN-β polypeptides can be used as a starting point to determine appropriate dosages. IFN-β variants that are more stable and have an increased half-life in vivo, can be effective at reduced dosage amounts and or frequencies. Dosages provided herein for treatments and therapies with IFN-β and recombinant forms are exemplary dosages. Such exemplary dosages, however, can provide guidance in selecting dosing regimes for IFN-β variants. Since the variants provided herein exhibit increased stability, dosages and administration regimens can differ from those for the unmodified IFN-β polypeptides. Particular dosages and regimens can be empirically determined.

[0547] Dosage levels can be determined based on a variety of factors, such as body weight of the individual, general health, age, the activity of the specific compound employed, sex, diet, time of administration, rate of excretion, drug combination, the severity and course of the disease, and the patient's disposition to the disease and the judgment of the treating physician. The amount of active ingredient that can be combined with the carrier materials to produce a single dosage form will vary depending upon the host treated and the particular mode of administration. Recombinant IFN-β polypeptides are administered using the following dosages and regimens:

[0548] (1) Rebif® (IFN-β-1a) is administered by subcutaneous injection three times per week; it is administered at 8.8 mcg for weeks 1-2, at 22 mcg for weeks 3-4 and at 44 mcg for week 5 and beyond. Peak effectiveness occurs approximately 14 hours post-injection and the recombinant polypeptide has a half-life of about 69 hours.

[0549] (2) Avonex® (IFN-β-1a) is administered once-weekly by intramuscular injection at a dose of 30 mcg. Dosage does not change over time. Peak effectiveness occurs 3-15 hours post-injection and the recombinant polypeptide has a half-life of about 10 hours.

[0550] (3) Betaseron® (IFN-β-1b) is administered every other day by subcutaneous injection at a dose of 250 mcg. Dosage does not change over time. Peak effectiveness occurs 1-8 hours post-injection and the recombinant polypeptide has a half-life of about 8 minutes to 4.3 hours.

[0551] The modified IFN-β polypeptides provided herein exhibit increased protein stability and improved half-life when administered to a subject having a disease or condition that is treated by administration of IFN-β. Of particular interest are those modified IFN-β polypeptides that are resistant to the matrix metalloproteinase, gelatinase B (MMP-9). Thus, modified IFN-β can be used to deliver longer lasting, more stable disease therapies, such as for example as a therapeutic for treating Multiple Sclerosis (MS). Examples of therapeutic improvements using modified IFN-β polypeptides include, for example, but are not limited to, lower dosages, fewer and/or less frequent administrations, decreased side effects and increased therapeutic effects. Modified IFN-β polypeptides can be tested for therapeutic effectiveness, for example by using known disease models as described elsewhere herein. Progression of disease symptoms and phenotypes can be monitored to assess the effects of the modified IFN-β. As comparisons, placebo-treated animals and animals treated with unmodified IFN-β can be used as controls. Thus the modified IFN-β polypeptides provided herein can be administered at lower dosages and/or less frequently than unmodified or wild-type IFN-β or recombinant forms of IFN-β including Rebif®, Avonex® or Betaseron® while retaining one or more therapeutic activities and/or having one or fewer/decreased side effects.

[0552] Upon improvement of a patient's condition, a maintenance dose of a compound or compositions can be administered, if necessary; and the dosage, the dosage form, or frequency of administration, or a combination thereof can be modified. In some cases, a subject can require intermittent treatment on a long-term basis upon any recurrence of disease symptoms.

[0553] 1. Autoimmune Diseases

[0554] A number of autoimmune diseases are targets for IFN-β therapy. Exemplary autoimmune diseases include, for example, multiple sclerosis and rheumatoid arthritis. The modified IFN-β proteins herein, and nucleic acids encoding modified IFN-βs can be used in therapies for autoimmune diseases. The modified IFN-βs herein provide increased protein stability and improved half-life. Thus, modified IFN-β can be used to deliver longer lasting, more stable therapies. Examples of therapeutic improvements using modified IFN-βs include, for example, but are not limited to, lower dosages, fewer and/or less frequent administrations, decreased side effects and increased therapeutic effects.

[0555] a. Multiple Sclerosis (MS)

[0556] Multiple sclerosis (MS) is a pathogenically heterogeneous chronic inflammatory disease of the central nervous system (CNS) and is one of the most common neurological diseases of young adults in Europe and North America. Approximately one (1) million people world-wide are afflicted by MS. Histological hallmarks of active MS include, for example, infiltration of T cells, macrophages and B cells, degradation of myelin (and to a lesser extent, axons) and reactive changes of astrocytes and microglia. Myelin is the fatty sheath that surrounds and protects nerve fibers and its destruction is called demyelination. Demyelination causes nerve impulses to be slowed and/or halted and produces the symptoms of MS (see, e.g., 2005 National MS Society Information Handbook). MS can be considered an autoimmune disease because inflammatory changes result from an attack against self myelin components. An influx of mononuclear cells occurs through a disrupted BBB into an immune-privileged CNS and the secretion of a variety of inflammatory cytokines and chemokines from glial cells leads to loss of myelin, disruption of oligodendrocyte integrity and axonal loss (Al-Omaishi et al., J. Leukocyte Biology, 65(4): 444-452 (1999). Four types of MS lesions have been proposed: macrophage-mediated demyelination (type I), antibody-mediated demyelination (type II), distal oligodendrogliopathy (type III), and demyelination secondary to oligodendrogliopathy (type IV). There is some speculation that the inflammatory reaction is primarily directed against an unknown infectious agent or that the inflammatory changes are secondary to a primary degenerative process. Studies of MS and MS lesions rely on animal models of inflammatory demyelination, such as experimental autoimmune encephalomyelitis (EAE). EAE can be induced in many species, such as mice, by active immunization with myelin antigens, such as MBP, and non-myelin antigens, such as proteolipid protein and myelin oligodendrocyte glycoprotein (MOG) (Hohlfeld and Wekerle, PNAS 101(Supp 2): 14599-14606 (2004)).

[0557] Matrix metalloproteinases (MMPs) facilitate T cell migration into the CNS, disrupt the blood-brain-barrier (BBB) and play a role in myelin break-down. MMPs are increased in brain tissue, cerebral spinal fluid (CSF) and blood of MS patients and function as effector molecules in several steps of MS pathogenesis (Gilli et al. Brain 127(Pt. 2): 259-268 (2004)). Gelatinase B (MMP-9) is capable of destroying the BBB and is capable of cleaving myelin basic protein (MBP) into immunodominant and encephalitogenic fragments (Nelissen et al. Brain 126: 1371-1381 (2003)). Increases in gelatinase B serum levels correlate with disease activity in relapsing remitting multiple sclerosis (RRMS). Additionally, gelatinase B can cleave IFN-β, thereby reducing the anti-viral and immunotherapeutic activities of the cytokine. An imbalance between gelatinase B and expression of its endogenous inhibitor, tissue inhibitor of metalloproteinase-1 (TIMP-1), is a feature in MS. Gelatinase B plays a functional role and is a therapeutic target in multiple sclerosis (Gilli et al. Brain 127(Pt. 2): 259-268 (2004); Lee et al. Brain 122: 191-197 (1999)). Inhibition of gelatinase B with inhibitors has been shown to suppress the development or reverse ongoing clinical EAE in a dose-dependent manner (Gijbels et al. J. Clin. Invest. 94: 2177-2182 (1994).

[0558] Administration of IFN-γ to MS patients has been shown to exacerbate the disease and induce major histocompatibility (MHC) class II expression in the central nervous system, where it is absent under normal physiological conditions. Presentation of antigens in the CNS through IFN-γ-induced class II expression leads to activation of autoreactive T cells, a primary event in pathogenesis of MS. IFN-β administration, on the other hand, has been shown to reduce exacerbations and actively diminish disease progression. IFN-β significantly down-regulates IFN-γ-induced FcγRI surface expression in peripheral blood monocytes. Down-regulation of FcγRI surface expression correlates with diminished cellular signaling through FcγRI, thereby decreasing release of proinflammatory cytokines (Van Weyenbergh et al. J. Immunol. 161: 1568-1574 (1998)).

[0559] IFN-β administration is an established treatment for RRMS and can act by inhibiting T-cell migration in vitro, down-regulating MMP expression, delaying clinical relapse and delaying progression of disability caused by the disease. Additionally, IFN-β has been shown to suppress IFN-γ production and inflammatory activity, and in MS, to help limit damage caused by inflammation and coordinate the immune system. IFN-β treatment also can result in a decrease in the severity of inflammation and de-myelination in the central nervous system, phenotypes often associated with MS. IFN-β can be administered for example, by injection, to treat MS. One of the molecular mechanisms by which IFN-β exerts therapeutic benefits is by reducing gelatinase B expression and increasing it endogenous inhibitor, TIMP-1. Primary progressive multiple sclerosis (PPMS) differs from RRMS in demographic and immunological aspect and MRI criteria. In PPMS patients, administration of IFN-β-1b decreases serum levels of gelatinase B and, thus, has therapeutic potential for treatment of PPMS (Yushchenko et al. J. Neurol. 250(10): 1224-1228 (2003)).

[0560] The modified IFN-β polypeptides provided herein, and nucleic acids encoding modified IFN-βs provided herein can be used in therapies for MS. The modified IFN-βs herein provide increased protein stability and improved half-life when administered to a subject having multiple sclerosis. Of particular interest are those modified IFN-β polypeptides that are resistant to gelatinase B. Thus, modified IFN-β can be used to deliver longer lasting, more stable MS therapies. Examples of therapeutic improvements using modified IFN-βs include, for example, but are not limited to, lower dosages, fewer and/or less frequent administrations, decreased side effects and increased therapeutic effects. Modified IFN-βs can be tested for therapeutic effectiveness, for example by using experimental autoimmune encephalomyelitis (EAE) mice, or any other known disease model for MS. Progression of disease symptoms and phenotypes is monitored to assess the effects of the modified IFN-β. As comparisons, placebo-treated animals and animals treated with unmodified IFN-β can be used as controls.

[0561] b. Rheumatoid Arthritis (RA)

[0562] Rheumatoid arthritis (RA) is a chronic inflammatory disease that affects the synovial tissue in multiple joints, which leads to joint destruction and disability. Activation of T cells is believed to be the causative factor leading to inflammation in RA, which in turn leads to the activation of macrophages and fibroblast-like synoviocytes. Fibroblast-like synoviocytes produce a variety of pro-inflammatory cytokines causing proliferation of synovial tissue associated with destruction of cartilage and bone. Tissue destruction in RA is closely related to the production of matrix metalloproteinases and other proteinases, which are able to degrade collagen and proteoglycans. Macrophages, which are found in the synovial lining layer, amplify stimulatory signals and tissue destruction. In the case of RA, macrophages are activated and mediate inflammation by the production of cytokines such as TNF-α, IL-1β, IL-6, IL-12, IL-15, IL-18, PDGF and TGF, which in turn activate fibroblast-like synoviocytes. It is apparent that there is an imbalance between pro-inflammatory and anti-inflammatory molecules in RA joints. Increased levels of MMP have been found in cartilage from RA patients and enzyme activity was found to correlate with lesion severity. Also, synovial fluid from RA patients contained greater levels of MMP than controls (Van Holten et al. Arthritis Research 4(6): 346-352 (2002)). One of the therapeutic targets in RA is MMPs to prevent destruction of cartilage and bone. Damage to bone, cartilage, tendons and ligaments is largely mediated by proteinases (e.g., metalloproteinases) involved in the breakdown of the extracellular matrix (ECM). Elevated levels of three matrix metalloproteinases have been have been observed in patients suffering from RA and correlate with disease progression: collagenase (MMP-1), stromelysin (MMP-3) and gelatinase B (MMP-9) (Grillet et al. Br. J. Rheum. 36: 744-747 (1997)). Inhibition of MMP activity has been demonstrated in models of MS and other inflammatory models, where MMPs are of pathological importance, such as rheumatoid arthritis (RA).

[0563] Natural MMP inhibitors exist and are produced locally by chondrocytes and fibroblast-like synoviocytes, and are termed tissue inhibitors of metalloproteinases (TIMPs). An imbalance of MMPs and TIMPs contributes to joint destruction. Several chemotherapeutic agents, antibiotics and synthetic peptides can inhibit MMP activity. MMP inhibitors are not being used extensively in practice, however, minocycline is an antibiotic that inhibits MMP activity and has been shown to be elevated in RA trials compared to control groups (Van Holten et al. Arthritis Research 4(6): 346-352 (2002)).

[0564] Administration of IFN-β to RA patients has been shown to cause a statistically significant reduction in the mean immunohistologic scores for CD3⁺ T cells and the expression of MMP-1, TIMP-1, CD38⁺ plasma cells, IL-6 and IL-1-β in synovial tissue. Thus, IFN-β therapy has immunomodulating effects on rheumatoid synovium and can help to diminish both joint inflammation and destruction (Smeets et al. Arthritis Rheum. 43(2): 270-4 (2000); van Holten et al. Arthritis Research 4(6): 346-253 (2002)). IFN-β-treated animals in a collagen-induced arthritis model displayed significantly less cartilage and bone destruction than controls, a result that correlated with a decreased number of positive cells of two gene products required for ostoclastogenesis, receptor activation of NF-κB ligand and c-Fos.

[0565] Administration of IFN-β also has been shown to be effective in alleviating overall symptoms of collagen-induced arthritis (CIA; Tak et al. Rheumatology 38(4): 362-9 (1999)) and juvenile rheumatoid arthritis (van Holten et al. Arthritis Research 4(6): 346-253 (2002)).

[0566] The modified IFN-β polypeptides provided herein, and nucleic acids encoding modified IFN-βs provided herein can be used in therapies for RA and CIA. The modified IFN-βs herein provide increase protein stability and improved half-life. Thus, modified IFN-β can be used to deliver longer lasting, more stable RA therapies. Examples of therapeutic improvements using modified IFN-βs include, for example, but are not limited to, lower dosages, fewer and/or less frequent administrations, decreased side effects and increased therapeutic effects. Modified IFN-βs can be tested for therapeutic effectiveness, for example by using animal models. For example, collagen-induced arthritis mice (DBA/1), or any other known disease model for RA or CIA, is treated with a modified IFN-β. Progression of disease symptoms and phenotypes is monitored to assess the effects of the modified IFN-β. As comparisons, placebo treated animals and animals treated with unmodified IFN-β can be used as controls.

[0567] 2. Inflammatory Diseases and Disorders

[0568] A number of inflammatory diseases and disorders are targets for IFN-β therapy. Exemplary diseases and disorders include, for example, inflammatory bowel diseases such as ulcerative colitis and Crohn's disease, asthma and Guillain-Barre syndrome. The modified IFN-β proteins herein, and nucleic acids encoding modified IFN-βs can be used in therapies for inflammatory diseases and disorders. The modified IFN-βs herein provide increased protein stability and improved half-life. Thus, modified IFN-β can be used to deliver longer lasting, more stable therapies. Examples of therapeutic improvements using modified IFN-βs include, for example, but are not limited to, lower dosages, fewer and/or less frequent administrations, decreased side effects and increased therapeutic effects.

[0569] a. Inflammatory Bowel Disease (IBD)

[0570] Inflammatory bowel diseases are chronic disorders of the gastrointestinal tract characterized by inflammation of the intestine (increase in number and activity of inflammatory cells in the gut mucosa), obstruction of parts of the intestine and resulting in abdominal cramping and persistent diarrhea. Inflammatory bowel diseases are generally incurable and debilitating. IBDs can affect both the large intestine and the small intestine. The main forms of IBD are: Crohn's disease and ulcerative colitis (UC). A difference between the two is the location and nature of the inflammatory changes in the gut.

[0571] Overproduction of Th1 cytokines, such as IL-12 and IFN-γ, leads to initiation of intestinal inflammation and is associated with inadequate secretion of the counter-regulatory and anti-inflammatory cytokines. IFN-γ, has shown to be present in increased amounts in the gut wall of patients with IBD. IFN-γ can act synergistically with other pro-inflammatory cytokines such as TNF-α, to modulate the epithelial barrier function and facilitate the development of chronic inflammatory infiltrates.

[0572] Production of chemoattractant factors by intestinal epithelial cells can contribute to mucosal infiltration by inflammatory cells. Specifically, secretion of IL-8 has been shown to be a chemoattractant for neutrophils (Warhurst et al. Gut 42: 208-213 (1998)). Presence of inflammatory cells and their secreted products are associated with tissue damage and ulceration that are hallmarks of IBDs. Additionally, the gut epithelium can initiate leukocyte recruitment into the mucosa by synthesizing and secreting chemokines, such as IL-8. IL-8 levels have been shown, in vivo, to be elevated in IBD patients.

[0573] Animal models for IBD include those in which animals IBD spontaneously occurs, animals that have been treated with agents that promote intestinal inflammation, rodents that have been genetically manipulated through gene targeting or the introduction of transgenes and immunodeficient animals into which cell populations that mediate intestinal inflammation have been transferred. Examples of animal IBD models are provided in Table 16.

TABLE 16
Animal IBD Models

| | |
|---|---|
| Spontaneously-occurring | C3H/HeJBir mouse strain |
| | SAMP1/Yit strain mice |
| Treatment with mucosal-injuring | Trinitrobenzene sulfonic acid (TNBS) |
| agents | enemas |
| | Dextran sulfate sodium (DDS) |
| | administration |
| Alteration of cytokine function | IL-10 knockout mouse |
| | IL-2 knockout mouse |
| | TNF ΔARE mice |
| | STAT-4 transgenic mice |
| Alteration of T cell function | T-cell receptor α knockout mouse |
| | T-cell receptor β knockout mouse |
| Impairment of epithelial barrier | Mutated multidrug-resistant gene mice |
| function | Intestinal trefoil factor knockout mouse |

[0574] Anti-IL-12 and anti-IFN-γ administration have been shown to have some effect in the treatment of IBDs, albeit with varying effects. IFN-β has been shown to suppress IFN-γ production and early events in the IFN-γ signaling pathway. IFN-β has also been shown to suppress inflammatory activity, increase expression of the anti-inflammatory cytokine IL-10, enhance T suppressor and natural killer cell activity, limit damage caused by inflammation and to coordinate the immune system. IFN-β acts by inhibiting T-cell migration, down-regulating MMP expression, delaying clinical relapse and delaying progression of disability caused by the disease. IFN-β treatment also can result in a decrease in the severity of inflammation in the large and small intestines, a phenotype often associated with inflammatory bowel diseases. IFN-β can be administered for example, by injection, to treat inflammatory bowel diseases. One of the molecular mechanisms by which IFN-β exerts therapeutic benefits is by reducing gelatinase B expression and increasing its endogenous inhibitor, TIMP-1.

[0575] i. Ulcerative Colitis

[0576] Ulcerative colitis is a largely superficial inflammation of the mucosa that leads to early ulcer formation and is a condition in which inflammatory responses and morphologic changes are limited to the colon. Ulcerative colitis usually begins in the rectal and sigmoid areas and progresses upward continuously. Inflammation is primarily limited to the mucosa and includes continuous involvement of variable severity with ulceration, edema and hemorrhage along the length of the colon. Histologically, polymorphonuclear leukocytes and mononuclear cells, goblet cell depletion, distortion of the mucosal glands and crypt abscesses cause acute and chronic inflammation of the mucosa (Hendrickson et al. Clin. Microbiol. Rev. 1591: 79-94 (2002)).

[0577] Type I interferons, such as IFN-β, have been shown to have promising clinical effects in Th2-dominated diseases, such as ulcerative colitis (Tilg and Kaser, Expert Opin. Biol. Ther. 4(4): 469-481 (2004)). IFN-β has been shown to inhibit the production of IFN-γ and TNF, and to antagonize early events in the IFN-γ signaling pathway. Additionally, IFN-β has been shown to increase expression of the anti-inflammatory cytokine, IL-10 and enhance T suppressor and natural killer cell activity (Nikolaus et al. Gut 52: 1286-1290 (2003)).

[0578] The modified IFN-β proteins herein, and nucleic acids encoding modified IFN-βs can be used in treatment of ulcerative colitis. The modified IFN-βs herein provide increased protein stability and improved half-life. Thus, modified IFN-β can be used to deliver longer lasting, more stable therapies. Examples of therapeutic improvements using modified IFN-βs include, for example, but are not limited to, lower dosages, fewer and/or less frequent administrations, decreased side effects and increased therapeutic effects. Modified IFN-βs can be tested for therapeutic effectiveness for airway responsiveness in ulcerative colitis models. IFN-β also can be administered to animal models as well as subjects such as in clinical trials to assess in vivo effectiveness in comparison to placebo controls and/or controls using unmodified IFN-β.

[0579] ii. Crohn's Disease

[0580] Crohn's disease manifests primarily as a transmural inflammation involving the full thickness of the bowel wall that frequently leads to bowel obstruction, fistulas and abscess formation. Treatments for Crohn's disease include anti-inflammatory agents, such as aminosalicylates or steroids, and immunosuppressive agents, such as 6-mercaptopurine, each of which suppresses symptoms rather than cures the disease.

[0581] Crohn's disease can affect any part of the gastrointestinal tract, from mouth to anus (skip lesions), although a majority of the cases start in the terminal ileum and ascending colon. The disease is discontinuous with areas of inflammation alternating normal areas. Activated T cells and macrophages accumulate in dense areas, and in some cases, are organized into typical granulomas. Interactions between T lymphocytes and macrophages and their secreted products, are the major contributors to development of Crohn's disease, and the pathogenic findings appear to result from interactions of environmental and genetic factors (Ann. Intern. Med. 128: 848-856 (1998)).

[0582] T cells from patients having Crohn's disease produced increased levels of IFN-γ. It has been shown that IFN-β suppresses IFN-γ activity, and therefore, could be administered as a therapeutic agent for Crohn's disease.

[0583] The modified IFN-β proteins herein, and nucleic acids encoding modified IFN-βs can be used in treatment of Crohn's disease. The modified IFN-βs herein provide increase protein stability and improved half-life. Thus, modified IFN-β can be used to deliver longer lasting, more stable therapies. Examples of therapeutic improvements using modified IFN-βs include, for example, but are not limited to, lower dosages, fewer and/or less frequent administrations, decreased side effects and increased therapeutic effects. Modified IFN-βs can be tested for therapeutic effectiveness for airway responsiveness in Crohn's disease models. IFN-β also can be administered to animal models as well as subjects such as in clinical trials to assess in vivo effectiveness in comparison to placebo controls and/or controls using unmodified IFN-β.

[0584] b. Asthma

[0585] Asthma is a chronic respiratory disease, often arising from allergies, that is characterized by sudden recurring attacks of labored breathing, chest constriction, and coughing. A chronic inflammatory respiratory disease characterized by periodic attacks of wheezing, shortness of breath, and a tight feeling in the chest. A cough producing sticky mucus is symptomatic. The symptoms often appear to be caused by the body's reaction to a trigger such as an allergen (commonly pollen, house dust, animal dander), certain drugs, an irritant (such as cigarette smoke or workplace chemicals), exercise, or emotional stress. These triggers can cause the asthmatic's lungs to release chemicals that create inflammation of the bronchial lining, constriction, and bronchial spasms. If the effect on the bronchi becomes severe enough to impede exhalation, carbon dioxide can build up in the lungs and lead to unconsciousness and death.

[0586] Type I interferons, such as IFN-β, have been shown to have promising clinical effects in Th2 dominated diseases, such as allergic asthma (Tilg and Kaser, Expert Opin. Biol. Ther. 4(4): 469-481 (2004)). Specifically, oral administration of IFN-β inhibited the late asthmatic response by suppressing the increase of respiratory resistance (Satoh et al. J. Interferon Cytokine Res 19(8): 887-894 (1999)).

[0587] The modified IFN-β proteins herein, and nucleic acids encoding modified IFN-βs can be used in treatment of asthma. The modified IFN-βs herein provide increased protein stability and improved half-life. Thus, modified IFN-β can be used to deliver longer lasting, more stable therapies. Examples of therapeutic improvements using modified IFN-βs include, for example, but are not limited to, lower dosages, fewer and/or less frequent administrations, decreased side effects and increased therapeutic effects. Modified IFN-βs can be tested for therapeutic effectiveness for airway responsiveness in asthmatic animal models. IFN-β also can be administered to animal models as well as subjects such as in clinical trials to assess in vivo effectiveness in comparison to placebo controls and/or controls using unmodified IFN-β.

[0588] c. Guillain-Barre Syndrome

[0589] Guillain-Barre syndrome (also sometimes called infectious polyneuritis or Landry's paralysis) is a condition characterized by temporary inflammation of the nerves, causing pain, weakness, and paralysis in the extremities and often progressing to the chest and face. It typically occurs after recovery from a viral infection or, in rare cases, following immunization for influenza. Guillain-Barre syndrome is a disease of the nervous system due to damage to the myelin sheath around nerves. The myelin sheath acts as an insulator the same as rubber or plastic around electrical wires. Guillain-Barre syndrome is the most frequently acquired nerve disease and, in many cases, it follows shortly after a virus infection. It also is rarely associated with immunizations, surgery, and childbirth. Symptoms of Guillain-Barre Syndrome include weakness, typically beginning in the legs and progressing upward; weakness is accompanied by decreased feeling (paresthesia). In severe cases, breathing can be affected enough to require a ventilator and, rarely, the heart can be affected. Guillain-Barre syndrome has been associated with increased circulating levels of gelatinase B (MMP-9).

[0590] Experimental autoimmune neuritis (EAN) is a well-known animal model of the human Guillain-Barre syndrome (GBS) and can be used to investigate autoimmune inflammation of the peripheral nervous system. Recombinant rat IFN-β (rrIFN-β) prevented clinical signs of EAN, and when treatment began after onset of symptoms, rrIFN-β ameliorated EAN. Additionally, both B- and T-cell responses towards peripheral myelin were suppressed by rrIFN-β as indicated by a strong decrease in the numbers of infiltrating CD4(+) T cells, macrophages, and other inflammatory cells as well as a significant reduction in MHC class II antigen expression and monocyte chemotactic protein-1 (MCP-1) production. Thus, suppression of EAN by IFN-β is associated with a decrease in the migration of inflammatory cells into peripheral nervous tissue Zou et al. (J. Neurosci. Res. 56(2): 123-30 (1999)). IFN-β modulates motility of activated normal lymphocytes across both human brain microvascular endothelial cells and extracellular matrix proteins. This inhibitor action is generally associated with decreased production of gelatinase B (MMP-9). IFN-β has been shown to induce a dose-dependent inhibition of lymphocyte adhesion to recombinant VCAM-1 and recombinant ICAM-1. Inhibition of the adhesion phase of leukodiapedesis is an important event for recovery of Guillain-Barre syndrome (Creange et al. Neurology. 57(9): 1704-6 (2001)).

[0591] The modified IFN-β proteins herein, and nucleic acids encoding modified IFN-βs can be used in treatment of Guillain-Barre syndrome. The modified IFN-βs herein provide increase protein stability and improved half-life. Thus, modified IFN-β can be used to deliver longer lasting, more stable therapies. Examples of therapeutic improvements using modified IFN-βs include, for example, but are not limited to, lower dosages, fewer and/or less frequent administrations, decreased side effects and increased therapeutic effects. Modified IFN-βs can be tested for therapeutic effectiveness in experimental autoimmune neuritis animal models. IFN-β also can be administered to animal models as well as subjects such as in clinical trials to assess in vivo effectiveness in comparison to placebo controls and/or controls using unmodified IFN-β.

[0592] 3. Proliferative Disorders

[0593] A number of proliferative diseases and disorders are targets for IFN-β therapy. Exemplary diseases and disorders include, for example, cancers and bone disorders. The modified IFN-β proteins herein, and nucleic acids encoding modified IFN-βs can be used in therapies for proliferative diseases and disorders. The modified IFN-βs herein provide increased protein stability and improved half-life. Thus, modified IFN-β can be used to deliver longer lasting, more stable therapies. Examples of therapeutic improvements using modified IFN-βs include, for example, but are not limited to, lower dosages, fewer and/or less frequent administrations, decreased side effects and increased therapeutic effects.

[0594] a. Cancer

[0595] IFN-β therapy can be used to treat a wide variety of cancers, including but not limited to, melanomas, such as uveal melanomas and their metastasis, colon and liver cancers and metastatic tumors, including, metastasis of cancers to colon, lungs and liver, and carcinomas. Treatments include systemic and localized administration of IFN-β. For example, IFN-β can be administered alone or in combination with, prior to, or subsequent to other cancer treating agents such as chemotherapeutic compounds. Cancer treatments include reduction of metastasis as well as treatment at tumor sites. Modes of administration include, but are not limited to, IFN-β protein injection, stem cell engraftment at tumor sites, administration of an adenovirus vector encoding an IFN-β systemically and/or at the tumor site. For eyes diseases such as melanoma, IFN-β can be administered by intraocular administration of protein and or nucleic acids (e.g. transfer vectors such as adenovirus and naked DNA). IFN-β also can be expressed in stem cells and stem cell engrafted at the tumor site used for targeted therapy.

[0596] The modified IFN-β proteins herein, and nucleic acids encoding modified IFN-βs can be used in cancer therapies. The modified IFN-βs herein provide increase protein stability and improved half-life. Thus, modified IFN-β can be used to deliver longer lasting, more stable cancer therapies. Examples of therapeutic improvements using modified IFN-βs include, for example, but are not limited to, lower dosages, fewer and/or less frequent administrations, decreased side effects and increased therapeutic effects.

[0597] Modified IFN-βs can be tested for therapeutic effectiveness using animal models for cancers. In one non-limiting example, an animal model such as a BALB/c mouse model for colon cancer is injected with a modified IFN-β preparation following tumor implantation into the model. Tumor size and metastasis is monitored over time compared to control animals not injected with IFN-β and/or animals injected with unmodified IFN-β. Additional immune responses such as induction of cell death and stimulation of natural killer cells can be monitored.

[0598] b. Bone Homeostasis

[0599] Osteoclasts are cells of monocyte/macrophage origin that erode bone matrix and regulation of their differentiation is central to the understanding of the pathogenesis and treatment of bone diseases such as osteoporosis. IFN-β has a role in bone homeostasis and has chondroprotective properties (Van Holten et al. Arthritis Research 4(6): 346-352 (2002)). Mice deficient in IFN-β signaling exhibit severe osteopenia (loss of bone mass) accompanied by enhanced osteoclastogenesis (Takayanagi et al. Nature 416(6882): 744-749 (2002)). Briefly, bone-resorbing osteoclasts and bone-forming osteoblasts are essential to maintaining a balance between bone resorption and formation. When the balance is disrupted in favor of osteoclasts, bone destruction occurs, such as observed in rheumatoid arthritis. Receptor activator of nuclear factor-κB ligand (RANKL) promotes the formation of osteoclasts, whereas osteoprotegerin inhibits osteoclast formation. The relative number of osteoclasts depends on the levels of RANKL versus osteoprotegerin. Additionally, osteoclasts control their own differentiation through a negative feedback mechanism. RANKL induces expression of IFN-β in osteoclast precursor cells via the transcription factor c-Fos. The cells then release IFN-β, which binds to and activates IFNAR1 and IFNAR2 on the precursors, thereby causing a decrease in c-Fos levels. Lack of c-Fos results in inhibition of osteoclast differentiation. Thus, IFN-β is central to bone homeostasis by inhibiting bone destruction.

[0600] The modified IFN-β proteins herein, and nucleic acids encoding modified IFN-βs can be used in treatment of diseases or disorders in which bone destruction occurs, including, but not limited to osteoporosis and osteopenia, as well as bone destruction in arthritis. The modified IFN-βs herein provide increased protein stability and improved half-life. Thus, modified IFN-β can be used to deliver longer lasting, more stable therapies. Examples of therapeutic improvements using modified IFN-βs include, for example, but are not limited to, lower dosages, fewer and/or less frequent administrations, decreased side effects and increased therapeutic effects. Modified IFN-βs can be tested for therapeutic effectiveness in collagen-induced arthritis animal models. IFN-β also can be administered to animal models as well as subjects such as in clinical trials to assess in vivo effectiveness in comparison to placebo controls and/or controls using unmodified IFN-β.

[0601] 4. Viral Infections

[0602] IFN-β can be used in the treatment of viral infections. For example, IFN-β therapies are used for the treatment of chronic viral hepatitis, such as hepatitis A and hepatitis B. Additionally, IFN-β can be used in the treatment of myocardial viral infection, including myocardial enteroviral persistence and myocardial adenovirus persistence. Treatment effects include reduction and/or elimination of the viral genomes as well as improved left ventricular function. IFN-β also can be used in the treatment of severe acute respiratory syndrome (SARS).

[0603] The modified IFN-β proteins herein, and nucleic acids encoding modified IFN-βs can be used in treatment of viral infections. The modified IFN-βs herein provide increased protein stability and improved half-life. Thus, modified IFN-β can be used to deliver longer lasting, more stable therapies. Examples of therapeutic improvements using modified IFN-βs include, for example, but are not limited to, lower dosages, fewer and/or less frequent administrations, decreased side effects and increased therapeutic effects. Modified IFN-βs can be tested for therapeutic effectiveness against viral infection in in vitro cell systems as well as in animal models. For example, viral replication can be measured in an in vitro cell culture system by infecting the cells with virus, and expressing IFN-β in such cells or administering IFN-β to the cells. Inhibition of viral replication can be monitored in comparison to controls using unmodified IFN-β. IFN-β also can be administered to animal models as well as subjects such as in clinical trials to assess in vivo effectiveness in comparison to placebo controls and/or controls using unmodified IFN-β.

### I. COMBINATION THERAPIES

[0604] In addition to the therapeutic uses described above, the modified IFN-β proteins, and nucleic acid molecules encoding modified IFN-β proteins can be administered in combination with other therapies including other biologics and small molecule compounds. For example, in viral therapies, such as treatment for hepatitis, modified IFN-β can be administered with additional anti-viral compounds, for example, flavin adenine dinucleotide. In another example, IFN-β can be used in the treatment of cancers with other anti-cancer treatments such as chemotherapeutic compounds, including 5-fluorouracil, cisplatin and doxorubicin. In another example, IFN-β can be used in the treatment of multiple sclerosis with additional compounds such as copolymer 1.

[0605] The modified IFN-β polypeptides also, optionally, can be administered with other cytokines such as for example, G-CSF and GM-CSF and others, including cytokines that have been modified for increased stability.

### J. ARTICLES OF MANUFACTURE AND KITS

[0606] Pharmaceutical compounds of modified IFN-β polypeptides or nucleic acids encoding modified IFN-β polypeptides, or a derivative or a biologically active portion thereof can be packaged as articles of manufacture containing packaging material, a pharmaceutical composition which is effective for treating an IFN-β-mediated disease or disorder, and a label that indicates that modified IFN-β polypeptide or nucleic acid molecule is to be used for treating a IFN-β-mediated disease or disorder.

[0607] The articles of manufacture provided herein contain packaging materials. Packaging materials for use in packaging pharmaceutical products are well known to those of skill in the art. See, for example, U.S. Pat. Nos. 5,323,907 and 5,052,558 each of which is incorporated herein in its entirety. Examples of pharmaceutical packaging materials include, but are not limited to, blister packs, bottles, tubes, inhalers, pumps, bags, vials, containers, syringes, bottles, and any packaging material suitable for a selected formulation and intended mode of administration and treatment. A wide array of formulations of the compounds and compositions provided herein are contemplated as are a variety of treatments for any IFN-β-mediated disease or disorder.

[0608] Modified IFN-β polypeptides and nucleic acid molecules also can be provided as kits. Kits can include a pharmaceutical composition described herein and an item for administration. For example a modified IFN-β can be supplied with a device for administration, such as a syringe, an inhaler, a dosage cup, a dropper, or an applicator. The kit can, optionally, include instructions for application including dosages, dosing regimens and instructions for modes of administration. Kits also can include a pharmaceutical composition described herein and an item for diagnosis. For example, such kits can include an item for measuring the concentration, amount or activity of IFN-β or an IFN-β regulated system of a subject.

### K. EXAMPLES

[0609] The following examples are included for illustrative purposes only and are not intended to limit the scope of the invention(s).

### Example 1

### Cloning of IFN-β into pNAUT-a Mammalian Expression Vector

[0610] The cDNA encoding IFN-β was cloned into a mammalian expression vector, prior to the generation of the selected mutations. A collection of pre-designed, targeted mutants was then generated such that each individual mutant was created and processed individually, physically separated from each other and in addressable arrays.

[0611] The mammalian expression vector was designed by first engineering the SSV9 CMV 0.3 pA vector (SSV9, also called psub201, is a clone containing the entire adeno-associated virus (AAV) genome inserted into the PvuII site of plasmid pEMBL, see e.g., Du et al., (1996) Gene Ther 3:254-261; Samulski et al. (1987) J Virol 61:3096-3101; U.S. Pat. No. 5,753,500) as follows:

[0612] Prior to the introduction of a new EcoRI restriction site by Quickchange® mutagenesis (Stratagene), the pSSV9 CMV 0.3 pA was cut by PvuII and re-ligated to get rid of the ITR (AAV inverted terminal repeat) functions. The oligonucleotides primers were:

EcoRI forward primer:

(SEQ ID NO: 513)

5′-GCCTGTATGATTTATTGGATGTTGGAATTCCCTGATGCGGTATTTTC
TCCTTACG-3′
and
EcoRI reverse primer:

(SEQ ID NO: 514)

5′-CGTAAGGAGAAAATACCGCATCAGGGAATTCCAACATCCAATAAATC
ATACAGGC-3′.
The construct sequence was confirmed by using the
following oligonucleotides:
Seq ClaI forward primer:

(SEQ ID NO: 515)

5′-CTGATTATCAACCGGGGTACATATGATTGACATGC-3′
and
Seq XmnI reverse primer:

(SEQ ID NO: 516)

5′-TACGGGATAATACCGCGCCACATAGCAGAAC-3′.

[0613] Following digestion with XmnI and ClaI, the XmnI-ClaI fragment containing the newly introduced EcoRI site was cloned into pSSV9 CMV 0.3 pA to replace the corresponding wild-type fragment and produce the construct pSSV9-2EcoRI.

[0614] The IFN β-cDNA was obtained from the pLG104R (containing human IFN-β1 gene, ATCC # 31902) construct. The sequence of the IFN β-cDNA was confirmed by sequencing using the primers below:

| | | |
|---|---|---|
| Seq forward primer: | 5′-CCTGATGAAGGAGGACTC-3′ | (SEQ ID NO: 517) |
| Seq reverse primer: | 5′-CCAAGCAGCAGATGAGTC-3′. | (SEQ ID NO: 518) |

The verified IFN β-encoding cDNA first was cloned into an E. coli vector (pTOPO-TA, Invitrogen). After checking of the cDNA sequence by automatic DNA sequencing, restriction of the vector at HindIII and XbaI restriction sites yielded a HindIII-XbaI fragment containing the IFN-β cDNA which was sub-cloned into the corresponding sites of pSSV9-2EcoRI, leading to the construct pAAV-EcoRI-IFN-beta (pNB-AAV-IFN-beta). Finally, following digestion with PvuII, the PvuII digested fragment of plasmid pNB-AAV-IFN-beta was sub-cloned into the PvuII site of pUC18 leading the final construct pUC-CMV-IFN-beta pA called pNAUT-IFN-beta (SEQ ID NO:660).

### Example 2

### Design of IFN-β Variants by 2D-Scanning and 3D-Scanning

[0615] 2D- and 3D-scanning technology, described herein and also described in published Application No. US-2004-0132977-A1 and U.S. application Ser. No. 10/658,355, was used to design and obtain IFN-β mutants with improved resistance to proteolysis and/or improved conformational stability, such as improved thermal stability. Is-HITs were identified based upon (1) protein property to be evolved (i.e., resistance to proteolysis or conformational stability); (2) amino acid sequence; and (3) properties of individual amino acids.

A. LEADS Created for Higher Resistance to Proteolysis

[0616] Variants were designed using 2D-scanning or 3D-scanning. Positions selected (is-HITs) on IFN-β (SEQ ID NO:1 or 3) were (numbering corresponds to amino acid positions in the mature protein of SEQ ID NO:1): Y3, L6, Q18, K19, L20, Q23, E29, L31, L24, K33, D34, F38, D39, P41, E42, E43, K45, Q48, Q49, F50, Q51, K52, E53, D54, L57, Y60, E61, M62, L63, Q64, F70, Q72, D73, W79, E81, E85, L87, L88, L98, K99, L102, E103, E104, K105, L106, E107, K108, E109, D110, K115, M117, L122, K123, Y125, Y126, Y132, L133, K134, K136, E137, Y138, W143, R147, E149, L151, F154, F156, L160, and L164. The native amino acids at each of the is-HIT positions listed and shown above was replaced by residues as listed in Table 17.

TABLE 17

| Amino acid at is-HIT | Replacing amino acids |
|---|---|
| Y | H, I |
| L | I, V, H, A, T, Q |
| D | N, Q, G |
| F | I, V |
| P | A, S |
| E | Q, H, N |
| M | I, V, T, Q, H, A |
| W | H, S |
| K | N, Q, S, H |
| R | H, Q |
| Q | H, S, T, N |

The variants generated were as follows Y3H, Y3I, L6I, L6V, L6H, L6A, L20I, L20V, L20H, L20A, L21I, L21V, L21T, L21Q, L21H, L21A, L24I, L24V, L24T, L24Q, L24H, L24A, D34N, D34Q, D34G, F38I, F38V, P41A, P41S, E43Q, E43H, E43N, F50I, F50V, E53Q, E53H, E53N, D54N, D54Q, D54G, L57I, L57V, L57T, L57Q, L57H, L57A, Y60H, Y60I, E61Q, E61H, E61N, M62I, M62V, M62T, M62Q, M62A, L63I, L63V, L63T, L63Q, L63H, L63A, F70I, F70V, W79H, W79S, L87I, L87V, L87H, L87A, L88I, L88V, L88T, L88Q, L88H, L88A, L98I, L98V, L98H, L98A, L102I, L102V, L102T, L102Q, L102H, L102A, L106I, L106V, L106T, L106Q, L106H, L106A, K115N, K115Q, K115S, K115H, K115N, M117I, M117V, M117T, M117Q, M117A, L122I, L122V, L122T, L122Q, L122H, L122A, Y125H, Y125I, Y126H, Y126I, Y132H, Y132I, L133I, L133V, L133T, L133Q, L133H, L133A, W143H, W143S, R147H, R147Q, E149Q, E149H, E149N, L151I, L151V, L151T, L151Q, L151H, L151A, F154I, F154V, F156I, F156V, L160I, L160V, L160T, L160Q, L160H, L160A, L164I, L164V, L164T, L164Q, L164H, L164A, K19N, E29N, K33N, D39N, E42N, K45N, K52N, D73N, E81N, E85N, K99N, E103N, E104N, K105N, E107N, K108N, E109N, D110N, K123N, K134N, K136N, E137N, Q18H, Q18S, Q18T, Q18N, Q23H, Q23S, Q23T, Q23N, Q48H, Q48S, Q48T, Q48N, Q49H, Q49S, Q49T, Q49N, Q51H, Q51S, Q51T, Q51N, Q64H, Q64S, Q64T, Q64N, Q72H, Q72S, Q72T, and Q72N. See SEQ ID NOS: 4-68, 71-87, 534, 535, 536-594, and 596-650. The variants were tested for biologic activity as described in Example 5 and for resistance to proteolysis as described in Example 7.

### LEADS Created for Higher Resistance to Proteolysis by Gelatinase B

[0617] Variants were designed using 2D scanning. Amino acids Phenylalanine (F), Leucine (L), Glutamic Acid (E), Tyrosine (Y), and Glutamine (Q) were chosen as target amino acids for replacement to increase proteolysis resistance of an IFN-β polypeptide by gelatinase B. Positions selected (is-HITs) on IFN-β (SEQ ID NO:1 or 3) were (numbering corresponds to amino acid positions in the mature protein of SEQ ID NO:1): Y3, L5, L6, F8, L9, Q10, F15, Q16, Q18, L20, L21, Q23, L24, L28, E29, Y30, L32, F38, E42, E43, L47, Q48, Q49, F50, Q51, E53, L57, Y60, E61, L63, Q64, F67, F70, Q72, E81, E85, L87, L88, Y92, Q94, L98, L102, E103, E104, L106, E107, E109, F111, L116, L120, Y125, Y126, L130, Y132, L133, E137, Y138, E149, L151, F154, F156, L160, Y163, and L164. The variants generated were as follows: Y3H, Y3I, L5V, L5I, L5T, L5Q, L5H, L5A, L5D, L5E, L5K, L5R, L5N, L5S, L6I, L6V, L6H, L6A, L6D, L6E, L6K, L6N, L6Q, L6R, L6S, L6T, L6C, F8I, F8V, F8D, F8E, F8K, F8R, L9V, L9I, L9T, L9Q, L9H, L9A, L9D, L9E, L9K, L9N, L9R, L9S, Q10D, Q10E, Q10K, Q10N, Q10R, Q10S, Q10T, Q10C, F15I, F15V, F15D, F15E, F15K, F15R, Q16D, Q16E, Q16K, Q16N, Q16R, Q16S, Q16T, Q16C, Q18H, Q18S, Q18T, Q18N, L20I, L20V, L20H, L20A, L20N, L20Q, L20R, L20S, L20T, L20D, L20E, L20K, L21I, L21V, L21T, L21Q, L21H, L21A, Q23H, Q23S, Q23T, Q23N, Q23D, Q23E, Q23K, Q23R, L28V, L28I, L28T, L28Q, L28H, L28A, E29N, E29Q, E29H, Y30H, Y30I, L32V, L32I, L32T, L32Q, L32H, L32A, F38I, F38V, E42N, E42Q, E42H, E43Q, E43H, E43N, L47V, L47I, L47T, L47Q, L47H, L47A, Q48H, Q48S, Q48T, Q48N, Q49H, Q49S, Q49T, Q49N, F50I, F50V, Q51H, Q51S, Q51T, Q51N, E53Q, E53H, E53N, L57I, L57V, L57T, L57Q, L57H, L57A, Y60H, Y60I, E61Q, E61H, E61N, L63I, L63V, L63T, L63Q, L63H, L63A, Q64H, Q64S, Q64T, Q64N, F67I, F67V, F70I, F70V, Q72H, Q72S, Q72T, Q72N, E81N, E81Q, E81H, E85N, E85Q, E85H, L87I, L87V, L87H, L87A, L87D, L87E, L87, L87R, L87N, L87Q, L87S, L87T, L88I, L88V, L88T, L88Q, L88H, L88A, Y92H, Y92I, Q94D, Q94E, Q94K, Q94N, Q94R, Q94S, Q94T, Q94C, L98I, L98V, L98H, L98A, L98D, L98E, L98K, L98N, L98Q, L98R, L98S, L98T, L98C, L102I, L102V, L102T, L102Q, L102H, L102A, E103N, E103Q, E103H, E104N, E104Q, E104H, L106I, L106V, L106T, L106Q, L106H, L106A, E107N, E107Q, E107H, E109N, E109H, E109Q, F111I, F111V, L116V, L116I, L116T, L116Q, L116H, L116A. L116V, L116I, L116T, L116Q, L116H, L116A, Y125H, Y125I, Y126H, Y126I, L130V, L130I, L130T, L130Q, L130H, L130A, Y132H, Y132I, L133I, L133V, L133T, L133Q, L133H, L133A, E137N, E137Q, E137H, Y138H, Y138I, E149Q, E149H, E149N, L151I, L151V, L151T, L151Q, L151H, L151A, F154I, F154V, F156I, F156V, L160I, L160V, L160T, L160Q, L160H, L160A, Y163H, Y163I, L164I, L164V, L164T, L164Q, L164H, and L164A. See SEQ ID NOS: 4-11, 16, 17, 20-27, 30-36, 39-42, 45-54, 61-70, 75-87, 157, 158, 163-168, 173, 174, 180-185, 190-193, 198, 199, 204, 205, 209, 210, 213-224, 233-238, 247-250, 266-279, 282, 283, 295-310, 328-358, 377-387, 396-403, 408-411, 447-454, 474-479, 497-504, 540-542, 547, 551, 555-558, 562-576, 578-583, 585-589, 591, 604-607, 610-614, 616-650, 652, 653, 655, 656, and 658. The variants were tested for biologic activity as described in Example 5 and for resistance to proteolysis by gelatinase B as described in Example 8.

B. LEADS Created to Stabilize IFN-β by Increasing Polar Interactions

[0618] Using the 2D scanning methods described above, charges were introduced into the hydrophobic areas of the IFN-β protein to favor polar interactions with the solvent. Positions containing amino acid residues with a side-chain oriented toward the solvent were selected for replacement with amino acids E, D, K, and R. The variants generated were as follows L5E, L5D, L5K, L5R, F8E, F8D, F8K, F8R, L9E, L9D, L9K, S12E, S12D, S12K S12R, F15E, F15D, F15K, F15R, Q16E, Q16D, Q16K, Q16R, L20E, L20D, L20K, L20R, W22E, W22D, W22K, Q23E, Q23D, Q23K, Q23R, L24E, L24D, L24K, L24R, G78E, G78D, G78K, G78R, W79E, W79D, W79K, W79R, N80E, N80D, N80K, T82E, T82D, T82K, T82R, I83E, I83D, I83K, I83R, N86E, N86D, N86K, N86R, L87E, L87D, L87K, L87R, A89E, A89D, A89K, and A89R. See SEQ ID NOS: 329-331, 342-348, 350, 359-362, 377-383, 385 397-398, 401, 403-435, 440-443, 447-450, and 455-458. Activity was assessed as described in Example 5 and conformational stability was assessed by resistance to temperature as is described in Example 9.

C. LEADS Created to Stabilize IFN-β by Increasing Polar Interactions Between Helices A and C

[0619] Mutations were made using the 2D scanning methods described above to increase polar interactions between helices A and C. Selected is-HIT positions were replaced with a selection of amino acids from E, D, K, R, N, Q, S and T. The variants generated were as follows M1E, M1D, M1K, M1R, M1N, M1Q, M1S, M1T, L5E, L5D, L5K, L5R, L5N, L5Q, L5S, L5T, L6E, L6D, L6K, L6R, L6N, L6Q, L6S, L6T, L9E, L9D, L9K, L9R, L9N, L9Q, L9S, L9T, Q10E, Q10D, Q10K, Q10R, Q10N, Q10S, Q10T, S13E, S13D, S13K, S13R, S13N, S13Q, S13T, N14E, N14D, N14K, N14R, N14Q, N14S, N14T, Q16E, Q16D, Q16K, Q16R, Q16N, Q16S, Q16T, C17E, C17D, C17K, C17R, C17N, C17Q, C17S, C17T, L20E, L20D, L20K, L20R, L20N, L20Q, L20S, L20T, I83E, I83D, I83K, I83R, I83N, I83Q, I83S, I83T, N86E, N86D, N86K, N86R, N86Q, N86S, N86T, L87E, L87D, L87K, L87R, L87N, L87Q, L87S, L87T, N90E, N90D, N90K, N90R, N90Q, N90S, N90T, V91E, V91D, V91K, V91R, V91N, V91Q, V91S, V91T, Q94E, Q94D, Q94K, Q94R, Q94N, Q94S, Q94T, I95E, I95D, I95K, I95R, I95N, I95Q, I95S, I95T, H97E, H97D, H97K, H97R, H97N, H97Q, H97S, H97T, L98E, L98D, L98K, L98R, L98N, L98Q, L98S, L98T, V101E, V101D, V101K, V101R, V101N, V101Q, V101S, and V101T. See SEQ ID NOS: 264, 268, 2669, 276, 277, 322-341, 346-358, 363-376, 381-403, 432-454, and 459-512. Activity was assessed as described in Example 5 and conformational stability was assessed by resistance to temperature as is described in Example 9.

D. LEADS Created to Stabilize IFN-B by Forming Disulfide Bridges Between Helices A and C

[0620] Mutations were made using the 2D scanning methods described above to create new intra-molecular disulfide bridges. The bridges impose conformational constraints and minimize denaturation by temperature or changes in pH during the production, storage or injection of the protein. Amino acids at selected is-HIT positions M1, L6, S10, S13, Q16, N90, V91, Q94, L98, and V101 were replaced by a cysteine (C). Combinations of one or more is-HIT position with the corresponding amino acid modification to a cysteine created a disulfide bridge. Each new bridge is based on two mutations, except bridges #7 and #8 which utilize the cysteine residue at amino acid position 17. The disulfide bridges are formed by the following pairs of variants: bridge #1 is M1C-V101C; bridge #2 is L6C-L98C; bridge #3 is Q10C-H97C; bridge #4 is Q10C-L98C; bridge #5 is S13C-Q94C; bridge #6 is Q16C-N90C; bridge #7 is N90C-C17; and bridge #8 is V91C-C17. See SEQ ID NOS: 126-133. Activity was assessed as described in Example 5 and conformational stability was assessed by resistance to temperature as is described in Example 9.

E. LEADS Created to Stabilize IFN-β by Altering the Isoelectric Point

[0621] The isoelectric point (pI) is the pH at which a protein has net charge of zero. IFN-β is a basic protein with a pI of 8.93 and 40 charged amino acids. It has been observed that IFN-β aggregates at pH 6-7, but is stable at pH 4 and that these properties are related to the surface charge. Thus, two strategies were performed to increase the stability of IFN-β: 1) increasing and 2) decreasing the isoelectric point of IFN-β.

[0622] Mutations at selected is-HIT positions E43, E53, D54, E61, E81, E85, E103, E104, E107, E109, and D110 by replacing E or D with K or R to add positive charges to the protein resulting in an increased pI by about 0.3 or 0.3. The variants were as follows: E43K, E53R, D54K, E61K, E81K, E85K, E103K, E104R, E107R, E109R, and D110K. See SEQ ID NOS: 134-144. Activity was assessed as described in Example 5 and conformational stability was assessed by resistance to temperature as is described in Example 9.

[0623] Mutations at selected is-HIT positions R11, K45, K52, K105, K108, R113, K115, R124, R152, and R165 by replacing K or R with Q decreased the pI by about 0.55 or 0.55. The variants were as follows: R11Q, K45Q, K52Q, K105Q, K108Q, R113Q, K115Q, R124Q, R152Q, and R165Q. See SEQ ID NOS: 56, 159, 169, 194, 200, 212, 230, 252, 256, and 281. Activity was assessed as described in Example 5 and conformational stability was assessed by resistance to temperature as is described in Example 9.

[0624] Mutations at selected is-HIT positions R11, K45, K52, K105, K108, R113, K115, R124, R152, and R165 by replacing basic amino acids K or R with acidic amino acids D or E decreased the pI by about 0.2 or 0.2. The variants were as follows: R11D, K45D, K52D, K105D, K108D, R113E, K115D, R124D, R124E, R152D, and R165D. See SEQ ID NOS: 145-153, 519, and 520. Activity was assessed as described in Example 5 and conformational stability was assessed by resistance to temperature as is described in Example 9.

### Example 3

### Mutagenesis

[0625] Mutagenesis was performed by replacing single amino acid residues at specific is-HIT target positions one-by-one. Once replacing amino acids were identified, they were systematically introduced to replace the is-HIT loci in the protein and thus, candidate LEADs were produced. Using standard recombinant DNA methods, mutagenesis reactions were performed with the Quickchange kit (Invitrogen) using pNAUT-IFNβ (SEQ ID NO:660) as the template and the presence of the mutation was verified by sequencing. Each mutant generated was the single product of an individual mutagenesis reaction. Substituted amino acids were compatible with protein structure and function. Mutant proteins were assessed in appropriate biological assays (see Example 5) and for the particular property modified (see Examples 7-9).

### Example 4

### Production and Normalization of Native and Modified IFN-β in Mammalian Cells

[0626] IFN-β was produced in Chinese Hamster Ovarian (CHO) cells (obtained from ATCC), using Dulbecco's modified Eagle's medium supplemented with glucose (4.5 g/L; Gibco-BRL) and fetal bovine serum (5%, Hyclone). Production of either native or mutant IFN-β was performed by transient transfection. Cells were transiently transfected as follows: 0.6×10⁵ cells were seeded into 6-well plates and grown for 24 h before transfection. Cells, at about 70% confluence, were supplemented with 1.0 pg of plasmid (from the library of pNAUT-IFN-β mutants, see above) by lipofectamine plus reagent (Invitrogen). After gently shaking, cells were incubated for 24 h with 1 ml of culture medium supplemented with 1% serum. IFN-β was obtained from culture supernatants 24 h after transfection and stored in aliquots at −80° C. until use.

[0627] Normalization of IFN-β concentration from culture supernatants was performed by ELISA. IFN-β concentrations from wild-type, and mutant samples were estimated by using an international reference standard provided by the National Institute for Biological Standard and Controls (NIBSC, United Kingdom). Preparations of IFN-β produced from transfected cells were screened following sequential biological activity assays as described below.

### Example 5

### Analysis of the Activity of the Modified IFN-β Polypeptides

[0628] Two activities were measured directly on IFN-β samples: anti-viral and anti-proliferation activities. Dose (concentration)-response (activity) experiments for anti-viral or anti-proliferation activity allowed for the calculation of the “potency” of anti-viral and anti-proliferation activities, respectively. Anti-viral and anti-proliferation activities also were measured after incubation with proteolytic samples such as specific proteases, mixtures of selected proteases, human serum or human blood as described below in Example 7. Assessment of activity following incubation with proteolytic samples allowed for the determination of the residual (anti-viral or anti-proliferation) activity and the respective kinetics of half-life upon exposure to proteases.

[0629] a. Assessment of Anti-Viral Activity

[0630] Anti-viral activity can be measured by cytopathic effects (CPE). Anti-viral activity of IFN-β was determined by the capacity of the cytokine to protect HeLa cells against EMC (mouse encephalomyocarditis) virus-induced cytopathic effects. The day before, HeLa cells (2×10⁵ cells/ml) were seeded in flat-bottomed 96-well plates containing 100 μl/well of Dulbecco's MEM-Glutamax-sodium pyruvate medium supplemented with 5% SVF and 0.2% of gentamicin. Cells were grown at 37° C. in an atmosphere of 5% CO₂ for 24 hours.

[0631] Two-fold serial dilutions of IFN-β samples were made with MEM complete media into 96-deep well plates with the final concentration ranging from 1600 to 0.6 pg/ml of IFN-β polypeptide. The medium was aspirated from each well and 100 μl of IFN-β dilutions were added to HeLa cells. Each IFN β sample dilution was assessed in triplicate. The two last rows of the plates were filled with 100 μl of medium without IFN-β dilution samples in order to serve as controls for cells with and without virus.

[0632] After 24 hours of growth, a 1/1000 EMC virus dilution solution was placed in each well, except for the cell control row. Plates were returned to the CO₂ incubator for 48 hours. Then, the medium was aspirated and the cells were stained for 1 hour with 100 μl of Trypan Blue staining solution to determine the proportion of intact cells. Plates were washed in a distilled water bath. The cell-bound dye was extracted using 100 μl of ethylene-glycol mono-ethyl-ether (Sigma). The absorbance of the dye was measured using an ELISA plate reader (Spectramax). The anti-viral activity of IFN-β samples (expressed as EC₅₀ average, pg/ml) was determined as the concentration of IFN-β needed for 50% protection of the cells against EMC virus-induced cytopathic effects.

[0633] b. Assessment of Anti-Proliferation Activity

[0634] Anti-proliferative activity of IFN-β was determined by assessing the capacity of wildtype or modified IFN-β to inhibit proliferation of Daudi cells. Daudi cells (ATCC, 1×10⁴ cells) were seeded in flat-bottomed 96-well plates containing 50 μl/well of RPMI-1640 medium supplemented with 10% SVF, 1× glutamine and 1 mL of gentamicin. No cells were added to the last row (“H” row) of the flat-bottomed 96-well plates in order to evaluate background absorbance of culture medium.

[0635] At the same time, two-fold serial dilutions of IFN-β samples were made with RPMI 1640 complete media into 96-deep-well plates with final concentration ranging from 6000 to 2.9 pg/ml. IFN-β dilutions (50 μl) were added to each well containing 50 μl of Daudi cells for a total volume in each well of 100 μl. Each IFN-β sample dilution was assessed in triplicate. Each well of the “G” row of the plates was filled with 50 μl of RPMI 1640 complete media as a positive control. The plates were incubated for 72 hours at 37° C. in a humidified, 5% CO₂ atmosphere.

[0636] After 72 hours of growth, 20 μl of Cell titer 96® Aqueous one solution reagent (Promega) was added to each well and incubated for 1.5 hours at 37° C. in an atmosphere of 5% CO₂. To measure the amount of colored soluble formazan produced by cellular reduction of the tetrazolium compound (3-(4,5-dimethylthiazol-2-yl)-5-(3-carboxymethoxyphenyl)-2-(4-sulfophenyl)-2H-tetrazolium, inner salt; MTS) in the Cell titer 96® Aqueous one solution reagent, the absorbance of the dye was measured using an ELISA plate reader (Spectramax) at 490 nm.

[0637] The corrected absorbances (“H” row background value subtracted) obtained at 490 nm were plotted versus concentration of IFN-β. The EC₅₀ value was calculated by determining the X-axis value corresponding to one-half the difference between the maximum and minimum absorbance values. (EC₅₀=the concentration of IFN-β necessary to give one-half the maximum response, see Example 6).

### Example 6

### Evaluation of IFN-β Variants

[0638] Various biological activities (see Example 5) and properties (see Examples 7-9), including protease resistance and potency of each individual mutant, were analyzed using a mathematical model and algorithm (NautScan; Fr. Patent No. 9915884; see, also published International PCT application No. WO 01/44809 based on PCT No. PCT/FR00/03503; and described above).

[0639] Data was processed using a Hill equation-based model that uses key feature indicators of the performance of each individual mutant. Briefly, the Hill equation is a mathematical model that relates the concentration of a drug (i.e., test compound or substance) to the response measured.

$$y = \frac{{{y}_{max} [ D ]}^{x}}{{[ D ]}^{n} + {[ {D}_{50} ]}^{n}}$$

y is the variable measured, such as a response, signal, yₘₐₓ is the maximal response achievable, [D] is the molar concentration of a drug (e.g., the IFN-β or modified IFN-β), [D₅₀] is the concentration that produces a 50% maximal response to the drug, n is the slope parameter, which is 1 if the drug binds to a single site and with no cooperativity between or among sites. A Hill plot is log₁₀ of the ratio of ligand-occupied receptor to free receptor vs. log [D] (M). The slope is n, where a slope of greater than 1 indicates cooperativity among binding sites, and a slope of less than 1 can indicate heterogeneity of binding. This equation has been employed in methods for assessing interactions in complex biological systems, the parameters, π, κ, τ, ε, η, θ, are as follows:

[0640] π is the potency of the biological agent acting on the assay (cell-based) system;

[0641] κ is the constant of resistance of the assay system to elicit a response to a biological agent;

[0642] ε is the slope at the inflexion point of the Hill curve (or, in general, of any other sigmoidal or linear approximation), to assess the efficiency of the global reaction (the biological agent and the assay system taken together) to elicit the biological or pharmacological response.

[0643] τ is used to measure the limiting dilution or the apparent titer of the biological agent.

[0644] θ is used to measure the absolute limiting dilution or titer of the biological agent.

[0645] η is the heterogeneity of the biological process or reaction. η measures the existence of discontinuous phases along the global reaction, which is reflected by an abrupt change in the value of the Hill coefficient or in the constant of resistance.

[0646] Modified IFN-β polypeptides were ranked based on the values of their individual performance, as assessed by EC₅₀. The biological specific activity (i.e., activity per unit of protein mass; units/mg protein) was determined for each mutant using serial dilutions of the mutant in a cell-based proliferation assay or anti-viral assay (see Example 5). Twelve dilutions were made for each curve and each dilution was assayed in triplicate. Using the data from the serial dilution assays, the concentration needed to achieve 50% activity (EC₅₀) was obtained. Experimental points were fitted to a sigmoidal curve using Gnuplot 5.0 (software for drawing data curves; available online at gnuplot.info) integrated to the NEMO (Newly evolved Molecules) software (Nautilus Biotech) as follows. The equation used for the sigmoidal curve fitting was:
Sig(x)=base+pmax*(x exp. nu)/X exp. nu)+kappa
where base, pmax, nu and kappa are parameters for each curve as follows: base=0.1, pmax=1, kappa=5000, nu=2.5 and n between 5 and 150. Gnuplot iterates fitting “n” times until it finds the best curve that fits the experimental data while minimizing the sum of the squares of the distance between each experimental point and the theoretical point on the fitting curve. Once the fitting curve for each mutant was obtained, the corresponding EC₅₀ and specific activity are calculated from the curves. Those on the top of the ranking list were selected as LEADs.

[0647] Exemplary IFN-β polypeptides tested for their activity included native wildtype IFN-β and exemplary candidate SuperLEADs such as set forth in Table 18 below. Table 18 below depicts the anti-viral activity (EC₅₀ average, pg/ml) and specific activity (average, IU/mg) of exemplary non-limiting IFN-β Super-LEAD polypeptides compared to wildtype IFN-β.

TABLE 18
Biological activity of IFN-β SuperLEADS

| | | EC₅₀ | | |
|---|---|---|---|---|
| NEMO | | Average | Specific Activity | Rate: |
| code | Mutation | (pg/mL) | Average (IU/mg) | Mutant/WT |
| 524 | L5D/L6E | 18.8 | 7.49 × 10⁸ | 2.9 |
| 525 | L5E/Q10D | 26.2 | 1.23 × 10⁹ | 4.7 |
| 526 | L5Q/M36I | 13.5 | 8.89 × 10⁸ | 3.4 |
| 527 | L6E/L47I | nd | nd | nd |
| 528 | L5E/K108S | 248.4 | 4.03 × 10⁷ | 0.2 |
| 529 | L5E/L6E | 32.8 | 2.14 × 10⁹ | 8.2 |
| 530 | L5D/Q10D | 4.50 | 1.12 × 10⁹ | 4.3 |
| 531 | L5N/M36I | 48.4 | 2.12 × 10⁸ | 0.8 |
| 532 | L6Q/L47I | 4.10 | 2.42 × 10⁹ | 9.3 |
| 533 | L5D/K108S | 15.2 | 1.31 × 10⁹ | 5.0 |
| 534 | L5N/L6E | 7.90 | 1.38 × 10⁹ | 5.3 |
| 535 | L5Q/Q10D | 21.8 | 4.58 × 10⁸ | 1.8 |
| 536 | L6E/M36I | 38.3 | 3.69 × 10⁸ | 1.4 |
| 537 | L5E/N86Q | 47.5 | 5.89 × 10⁸ | 2.3 |
| 538 | L5Q/K108S | 9.60 | 1.06 × 10⁹ | 4.1 |
| 539 | L5Q/L6E | 4.10 | 2.45 × 10⁹ | 9.4 |
| 540 | L5N/Q10D | 7.70 | 1.31 × 10⁹ | 5.0 |
| 541 | L6Q/M36I | 13.1 | 8.13 × 10⁸ | 3.1 |
| 542 | L5D/N86Q | 32.2 | 5.20 × 10⁸ | 2.0 |
| 543 | L5N/K108S | 66.0 | 3.31 × 10⁸ | 1.3 |
| 544 | L5D/L6Q | 8.90 | 1.15 × 10⁹ | 4.4 |
| 545 | L6E/Q10D | 5.80 | 1.74 × 10⁹ | 6.7 |
| 546 | L5E/L47I | nd | nd | nd |
| 547 | L5Q/N86Q | 26.9 | 3.72 × 10⁸ | 1.4 |
| 548 | L6E/K108S | 24.7 | 5.48 × 10⁸ | 2.1 |
| 549 | L5E/L6Q | 39.2 | 6.22 × 10⁸ | 2.4 |
| 550 | L6Q/Q10D | 13.9 | 7.18 × 10⁸ | 2.8 |
| 551 | L5D/L47I | 10.7 | 2.36 × 10⁹ | 9.1 |
| 552 | L5N/N86Q | 21.4 | 6.75 × 10⁸ | 2.6 |
| 553 | L6Q/K108S | 79.0 | 5.08 × 10⁸ | 1.9 |
| 554 | L5N/L6Q | 44.3 | 3.84 × 10⁸ | 1.5 |
| 555 | L5E/M36I | 5.90 | 1.71 × 10⁹ | 6.6 |
| 556 | L5Q/L47I | nd | nd | nd |
| 557 | L6E/N86Q | 25.3 | 4.00 × 10⁸ | 1.5 |
| 558 | L5Q/L6Q | 7.70 | 1.30 × 10⁹ | 5.0 |
| 559 | L5D/M36I | 52.3 | 3.93 × 10⁹ | 15.1 |
| 560 | L5N/L47I | 2.90 | 3.43 × 10⁹ | 13.1 |
| 561 | L6Q/N86Q | 30.8 | 6.12 × 10⁸ | 2.3 |
| 523 | WT | 32.49 | 3.08 × 10⁸ | 1.2 |
| 523 | WT | 33.56 | 3.32 × 10⁸ | 1.3 |
| 523 | WT | 26.99 | 2.03 × 10⁸ | 0.8 |
| 523 | WT | 29.90 | 2.18 × 10⁸ | 0.8 |
| 523 | WT | 27.05 | 2.05 × 10⁸ | 0.8 |
| 523 | WT | 32.01 | 2.99 × 10⁸ | 1.1 |
| 523 | WT average | 30.74 | 2.61 × 10⁸ | 1.0 |
| | nibsc | 40.6 | 2.46 × 10⁸ | |
| | nibsc | 32.22 | 3.10 × 10⁸ | |

nibsc: National Institute for Biological Standard and Controls (UK);
nd: not determined

### Example 7

### Assessment of Proteolytic Resistance

[0648] a. Treatment of IFN-β with Proteolytic Preparations

[0649] Following determination by ELISA of the amount of IFN-β produced (for native as well as for each mutant IFN-β), up to 150 μl of supernatant containing varying concentrations of native IFN-β or variants (0 to 1000 pg/ml) were treated with a mixture of proteases at 1% w/w of total proteins in the supernatant (e.g., 1% serum, as the concentration of total protein in 1% serum is 600 μg/ml, the 1% proteases was based on the total amount of proteins and not only in the amount of IFN-β). Modified IFN-β polypeptides were treated with proteases in order to identify resistant molecules. The resistance of the modified IFN-β molecules compared to wild-type IFN-β was determined by exposure (120 min, 25° C.) to a mixture of proteases (containing 1.5 pg of each of the following proteases (1% wt/wt, Sigma): α-chymotrypsin, carboxypeptidase, endoproteinase Arg-C, endoproteinase Asp-N, endoproteinase Glu-C, endoproteinase Lys-C, and trypsin). At the end of the incubation time, 10 μl of anti-protease complete medium containing mini EDTA free tablets (Roche) diluted 1/1000 in 10 ml DMEM was added to each reaction in order to inhibit protease activity. Treated samples were then used to determine residual anti-viral or anti-proliferation activities as described above in Example 5. Native IFN-β incubated in the absence of protease exhibited anti-viral activity beginning at concentrations greater than 10 pg/ml which dose-dependently increased until a concentration of 100 pg/ml where the concentration of IFN-β required to achieve maximal anti-viral activity reached a plateau. Incubation of native IFN-β for 2 hours with proteases resulted in no detectable residual anti-viral activity, even at concentrations as high as 800 pg/ml of IFN-β polypeptide. Modified IFN-β polypeptides exhibiting improved resistance to proteolysis were those assessed to have residual anti-viral activity following incubation with proteases comparable to native IFN-β incubated in the absence of proteases. The residual activity of modified IFN-β polypeptides was similar following incubation in the presence or absence of protease, demonstrating that the IFN-β LEAD is resistant to proteolysis.

[0650] b. Kinetic Analysis

[0651] The percent of residual IFN-β activity over time of exposure to proteases was evaluated by a kinetic study using 1.5 pg of protease mixture. Incubation times were: 0 h, 0.5 h, 2 h, 4 h, 8 h, 12 h, 24 h and 48 h. Briefly, 20 μl of each proteolytic sample (proteases, serum, blood) was added to 100 μl of IFN-β at 400 and 800 pg/ml and incubated for variable times, as indicated. At the appropriate time points, 10 μl of anti-proteases complete medium containing mini EDTA-free tablets (Roche; one tablet dissolved in 10 ml of DMEM and then diluted 1/500) was added to each well in order to stop proteolysis reactions. Biological activity assays were then performed as described above in Example 5 for each sample in order to determine the residual activity at each time point. IFN-β polypeptides tested included native IFN-β and exemplary candidate LEADs and SuperLEADs including L6Q, M36I, L5N, Q10D, L5Q, L6Q, L5E/Q10D, L5E/K108S, L6Q/L47I, L5D/K108S, L5N/L6E, L5Q/K108S, L5N/Q10D, L6Q/M36I, L5D/N86Q, L5N/K108S, L5D/L6Q, L6E/Q10D, L5Q/N86Q, L6E/K108S, L5D/L47I, L6Q/K108S, L5N/L6Q, L6E/N86Q, L5Q/L6Q, L5D/M36I, L5N/L47I, and L6Q/N86Q. All exemplary candidate LEADs and SuperLeads tested exhibited improved protease resistance compared to native IFN-β. Native IFN-β began to exhibit reduced residual anti-viral activity following incubation with protease for less than 1 hour which declined over time such that native IFN-β exhibited no detectable residual anti-viral activity following incubation with protease for 6 hours and greater. The time of incubation of native IFN-β with proteases required to give 50% of total anti-viral activity was 2 hours. In a kinetic analysis of protease resistance where incubation times tested were 0, 0.5, 1, 2.5, 4, 6, and 8, modified IFN-β polypeptides Q10D, L5N, L6Q, and L5Q exhibited about 50% residual anti-viral activity up to 8 hours incubation with protease compared to the activity of the respective polypeptides in the absence of incubation with protease. The double mutants containing a combination of the LEAD mutations, L5N/Q10D and L5Q/L6Q, exhibited residual activity up to 8 hours following incubation with protease that was similar to the anti-viral activity of the respective polypeptide in the absence of incubation with protease. Similarly, modified IFN-β polypeptides L6Q and M36I exhibited about 50% and 20%, respectively, residual anti-viral activity up to 8 hours incubation with protease compared to the activity of the respective polypeptides in the absence of incubation with protease. The double mutant containing a combination of the LEAD mutations, L6Q/M36I, exhibited residual activity up to 8 hours following incubation with protease that was similar to its anti-viral activity in the absence of incubation with protease.

[0652] In some experiments, the time of incubation with proteases required to give 50% of total activity (anti-viral or anti-proliferative) compared to the absence of incubation with proteases was determined. Table 19 below depicts the results of kinetic analysis of residual activity of exemplary non-limiting IFN-β SuperLeads following treatment with protease and the time of incubation with protease required to give 50% of total anti-viral activity. Also depicted in Table 19 is the rate of increased proteolysis which is a ratio of time at 50% activity of the modified IFN-β polypeptide compared to a wildtype or native IFN-β.

TABLE 19
IFN-β SuperLEADS Exhibiting Increased Resistance to
Proteolysis

| | | Proteolysis Resistance | |
|---|---|---|---|
| NEMO | | Time at 50% Total | Rate: |
| Code | Mutant | Activity | Mutant/Wild-type |
| 525 | L5E/Q10D | 16 | 8 |
| 528 | L5E/K108S | 24 | 12 |
| 532 | L6Q/L47I | 24 | 12 |
| 533 | L5D/K108S | 24 | 12 |
| 534 | L5N/L6E | 24 | 12 |
| 538 | L5Q/K108S | 16 | 8 |
| 540 | L5N/Q10D | 24 | 12 |
| 541 | L6Q/M36I | 16 | 8 |
| 542 | L5D/N86Q | 20 | 10 |
| 543 | L5N/K108S | 10 | 5 |
| 544 | L5D/L6Q | 10 | 5 |
| 545 | L6E/Q10D | 24 | 12 |
| 547 | L5Q/N86Q | 16 | 8 |
| 548 | L6E/K108S | 20 | 10 |
| 551 | L5D/L47I | 20 | 10 |
| 553 | L6Q/K108S | 16 | 8 |
| 554 | L5N/L6Q | 24 | 12 |
| 557 | L6E/N86Q | 24 | 12 |
| 558 | L5Q/L6Q | 20 | 10 |
| 559 | L5D/M36I | 24 | 12 |
| 560 | L5N/L47I | 24 | 12 |
| 561 | L6Q/N86Q | 24 | 12 |
| 523 | WT | 2.0 | 1.0 |
| 523 | WT | 2.0 | 1.0 |
| 523 | WT | 2.0 | 1.0 |
| 523 | WT | 2.0 | 1.0 |
| 523 | WT | 2.0 | 1.0 |
| 523 | WT | 2.0 | 1.0 |
| 523 | WT Average | 2.0 | 1.0 |

[0653] c. Additional Kinetic Analyses of IFN-β LEAD Proteins

[0654] In a separate experiment, WT and IFN-β mutant LEAD proteins were tested for biological activity and resistance to proteolysis. In this experiment LEAD proteins were produced in human embryonic kidney cell line, 293-EBNA, using Dubelcco's modified Eagle's medium supplemented with glucose (4.5 g/L; Gibco-BRL), glutamine (2 mM, Gibco-BRL), Geneticin (0.25 g/l, Gibco-BRL) and fetal bovine serum (10%, Hyclone). Cells were transiently transfected with the plasmids encoding the IFN-β mutants as follows: 15×10⁶ cells were seeded into triple flasks and grown for 48 h before transfection. Cells, at about 70% confluence, were transfected with 45 μg of plasmid (from the library of pNAUT-IFN-β mutants, see above) by using polyethyleneimine (PEI, Sigma) solution. Briefly, plasmid DNAs were mixed with 150 mM NaCl solution (Sigma) and then, a 10 mM PEI mixture diluted into 150 mM NaCl solution was added dropwise to plasmid DNA mixture. The DNA/PEI mixture was incubated for 15 minutes at room temperature before addition to each of the flasks containing 25 ml of culture medium supplemented with 1% serum. After gently shaking the flasks, cells were incubated at 37° C. in 10% CO₂ atmosphere and supernatants containing IFN-β proteins are collected 48 hours after transfection into 1 liter bottle aliquots at 4° C. Normalization of IFN-β concentration from culture supernatants was performed by enzyme-linked immunoabsorbent assay (ELISA) using two commercial kits (PBL Biomedical Laboratories and TFB, Fujirebio Inc.) according to the manufacturer's instructions. IFN-β concentrations from wild-type, and mutant samples were estimated by using an international reference standard provided by the National Institute for Biological Standard and Controls (NIBSC, United Kingdom).

[0655] For the biological activity assay, the protocol described in Example 5a was employed with the following modifications. Serial dilutions of each mutant protein were performed to produce 12 concentrations of protein in the range of 1.42 pg/ml to 3000 pg/ml. The proteins were added to HeLa cells as described in Example 5a, and incubated for 16 hours at 37° C. in an atmosphere of 5% CO₂. Following treatment of the HeLa cells with the IFN-β mutant LEAD proteins, the HeLa cells were infected with EMC-virus. At 48 hour post-infection, the resistance to viral infection was assayed by determination of the number of living cells by staining with methylene blue followed by OD measurement. The absorbance of the dye was measured using an ELISA plate reader (Spectramax). The anti-viral activity of IFN-β samples (expressed as EC₅₀ average, pg/ml) was determined as the concentration of IFN-β needed for 50% protection of the cells against EMC virus-induced cytopathic effects.

[0656] For the resistance to proteases assay, WT and IFN-β mutant LEAD proteins (400 pg) were treated with a mixture of proteases for different lengths of time between 30 minutes and 24 hours prior to addition to HeLa cells, as described in Example 7b. The percent of residual IFN-β activity over time of exposure to proteases was evaluated using 1.5 pg of the protease mixture (approximately 1% of total proteins in assay, Example 7a). Incubation times were: 0 h, 2 h, 4 h, 8 h, 16 h, and 24 h. Following protease exposure, the proteolysis reaction was inhibited by the addition of protease inhibitors. The treated WT and IFN-β mutant LEAD proteins were then tested for antiviral activity as described in Example 5 in order to determine the residual activity at each time point. After 16 hours of incubation with the HeLa cells with the IFN-β mutant LEAD proteins, the HeLa cells were infected with EMC-virus. At 48 hours post-infection, the resistance to viral infection was assayed by determination of the number of living cells by staining with methylene blue followed by OD measurement as described above.

[0657] Data for an exemplary selection of mutant IFN-β LEAD polypeptides are shown in Table 19b.

[0658] Tested polypeptides included native IFN-β and exemplary candidate LEADs including L5Q, M36I, L47I, K105S, K108S, K108H, L5D, L5E, L5N, L6E, L6Q, L6R, L6S, L9N, Q10D, S13D, C17N, C17T, N86Q, N86T, Q94D, Q94S, H97D, and N90C. The exemplary candidate LEADs and SuperLeads tested exhibited improved protease resistance compared to native IFN-β. Native IFN-β began to exhibit reduced residual anti-viral activity following incubation with protease for less than 1 hour which declined over time such that native IFN-β exhibited no detectable residual anti-viral activity following incubation with protease for 6 hours and greater. In a kinetic analysis of protease resistance where incubation times tested were 0 h, 2 h, 4 h, 8 h, 16 h, and 24 h, modified IFN-β polypeptides L5E, L5D, L5Q, M36I, and L5N exhibited about 50% or more residual anti-viral activity up to 8 hours incubation with proteases compared to the activity of the respective polypeptides in the absence of incubation with proteases.

[0659] In some experiments, the time of incubation with proteases required to give 50% of total activity (anti-viral) compared to incubation in the absence of proteases was determined. Table 19b below depicts the results of kinetic analysis of residual activity of exemplary non-limiting IFN-β Leads following treatment with protease and the time of incubation with protease required to give 50% of total anti-viral activity. Also depicted in Table 19b is the rate of increased proteolysis which is a ratio of time at 50% activity of the modified IFN-β polypeptide compared to a wildtype or native IFN-β.

TABLE 19b
IFN-β LEADS Exhibiting Increased Resistance to Proteolysis

| | | Proteolysis Resistance | |
|---|---|---|---|
| NEMO | | Time at 50% Total | Rate: |
| Code | Mutant | Activity | Mutant/Wild-type |
| 9 | L5Q | 10.00 | 5 |
| 58 | M36I | 16.00 | 8 |
| 72 | L47I | 8.00 | 4 |
| 104 | K105S | 9.00 | 4.5 |
| 110 | K108S | 8.00 | 4 |
| 111 | K108H | 9.00 | 4.5 |
| 169 | L5D | 12.00 | 6 |
| 170 | L5E | 14.00 | 7 |
| 247 | L5N | 10.00 | 5 |
| 250 | L6E | 10.00 | 5 |
| 253 | L6Q | 8.00 | 4 |
| 254 | L6R | 10.00 | 5 |
| 255 | L6S | 12.00 | 6 |
| 257 | L9N | 9.00 | 4.5 |
| 259 | Q10D | 22.00 | 11 |
| 266 | S13D | 10.00 | 5 |
| 286 | C17N | 22.00 | 11 |
| 290 | C17T | 8.00 | 4 |
| 299 | N86Q | 12.00 | 6 |
| 301 | N86T | 6.00 | 3 |
| 321 | Q94D | 4.00 | 2 |
| 326 | Q94S | 8.00 | 4 |
| 336 | H97D | 11.00 | 5.5 |
| 369 | N90C | 24.00 | 12 |
| | WT | 2.0 | 1.0 |

### Example 8

### Assessment of Resistance to Gelatinase B

[0660] Native IFN-β polypeptide or modified IFN-β polypeptides (15 μg per sample) were treated with gelatinase B (SIGMA) at ratio 10:1 w/w. Samples were collected at various time points between 5 minutes and 20 hours of incubation, and the protease reaction was stopped by adding 50 μl of anti-proteases solution (Roche). Samples were stored at −20° C. At the appropriate time points, 10 ml of anti-proteases complete medium containing mini EDTA-free tablets (Roche; one tablet dissolved in 10 ml of DMEM and then diluted 1/500) was added to each well in order to stop proteolysis reactions. Biological activity assays were then performed as described for each sample in order to determine the residual activity at each time point. IFN-β polypeptides tested included native IFN-β and exemplary candidate LEADs and SuperLEADs including L6E/K108S, L5D/M36I, L5D, L5E, L5N, Q94D, L5Q/K108S, L5D/K108S, L5D/L6Q, L6E/Q10D, L5D/L47I, L5S, Q10D, L5E/K108S, L5N/Q10D, and L5N/K108S. After incubation with gelatinase B for less than 100 minutes, native IFN-β exhibiting no detectable residual activity in an anti-viral assay. All candidate LEADs tested demonstrated improved resistance to proteolysis by gelatinase B compared to native IFN-β, although at varying levels. Following incubation with gelatinase B for 200 minutes, Q94D, L5N, L5E, L5E/K108S, L5S, L5N/K108S, and L5N/Q10D showed residual anti-viral activity comparable to incubation in the absence of protease, which decreased to no or low residual activity following incubation with gelatinase B for approximately 400 minutes. L5D/K108S, L5D/M36I, L5D, L6E/K108S, L5Q/K108S, L6E/Q10D, L5D/L47I, L5D/L6Q, and Q10D showed almost complete resistance to gelatinase B as assessed by residual anti-viral activity following incubation with gelatinase B up to the maximal incubation time tested, 20 hours. L5D/K108S, L5D/M36I, L5D, L6E/L6Q, L5D/L47I, and L5D/L6Q were the most resistant with no loss in residual activity following incubation with gelatinase B for 20 h.

### Example 9

### Assessment of Conformational Stability: Thermal Tolerance Assay

[0661] After determination by ELISA of the amount of proteins produced (for each individual IFN-β variant and for native IFN-β), 0.4 ng of native IFN-β or modified IFN-β was added to 250 μl of DMEM serum free medium supplemented with 1× anti-protease cocktail mixture (mini EDTA free, Roche) and incubated at 37° C. in a deep-well plate. To assess the kinetics of thermal tolerance, individual IFN-β polypeptides (wildtype or variant) were incubated for increasing time at 37° C. At increasing time-points (0, 2, 4, 6, 8, 12, 24, 36, 48 hours), 380 μl of DMEM medium supplemented with 5% SVF was added to 20 μl aliquots (final concentration 12000 pg/ml of IFN-β). Samples are immediately frozen and stored at −20° C. Biological activity assays were then performed as described for each sample in order to determine the residual activity at each time point. The time of incubation at a temperature of 37° C. required to give 50% of total activity (anti-viral or anti-proliferative) compared to incubation at room temperature was determined. Table 20 below depicts the results of kinetic analysis of residual activity of exemplary non-limiting IFN-β SuperLeads following treatment with increased temperature. Also depicted in Table 20 is the rate of increased thermal stability which is a ratio of time at 50% activity of the modified IFN-β polypeptide compared to a wildtype or native IFN-β.

TABLE 20
IFN-β SuperLEADS Exhibiting Increased Thermal Tolerance

| NEMO | | Temperature Stability | Rate: |
|---|---|---|---|
| Code | Mutant | Time at 50% Total Activity | mutant/wild-type |
| 525 | L5E/Q10D | 48 | 16.0 |
| 528 | L5E/K108S | 24 | 8.0 |
| 532 | L6Q/L47I | 30 | 10.0 |
| 533 | L5D/K108S | 24 | 8.0 |
| 534 | L5N/L6E | 48 | 16.0 |
| 538 | L5Q/K108S | 24 | 8.0 |
| 540 | L5N/Q10D | 48 | 16.0 |
| 541 | L6Q/M36I | 48 | 16.0 |
| 542 | L5D/N86Q | 48 | 16.0 |
| 543 | L5N/K108S | 24 | 8.0 |
| 544 | L5D/L6Q | 48 | 16.0 |
| 545 | L6E/Q10D | 48 | 16.0 |
| 547 | L5Q/N86Q | 48 | 16.0 |
| 548 | L6E/K108S | 40 | 13.3 |
| 551 | L5D/L47I | 48 | 160 |
| 553 | L6Q/K108S | 48 | 16.0 |
| 554 | L5N/L6Q | 48 | 16.0 |
| 557 | L6E/N86Q | 48 | 16.0 |
| 558 | L5Q/L6Q | 30 | 10.0 |
| 559 | L5D/M36I | 48 | 16.0 |
| 560 | L5N/L47I | 48 | 16.0 |
| 561 | L6Q/N86Q | 36 | 12.0 |
| 523 | WT | 3.0 | 1.0 |
| 523 | WT | 3.0 | 1.0 |
| 523 | WT | 3.0 | 1.0 |
| 523 | WT | 3.0 | 1.0 |
| 523 | WT | 3.0 | 1.0 |
| 523 | WT | 3.0 | 1.0 |
| 523 | WT Average | 3.0 | 1.0 |

[0662] Table 20b below depicts the results of kinetic analysis of residual activity of exemplary non-limiting IFN-β Leads following treatment with increased temperature. Also depicted in Table 20b is the rate of increased thermal stability which is a ratio of time at 50% activity of the modified IFN-β polypeptide compared to a wildtype or native IFN-β. The polypeptides tested were prepared as described in Example 7c. The polypeptides were subjected to the thermal tolerance assay as described above followed by assessment of IFN-β viral activity as described in Example 7c.

TABLE 20b
IFN-β SuperLEADS Exhibiting Increased Thermal Tolerance

| NEMO | | Temperature Stability | Rate: |
|---|---|---|---|
| Code | Mutant | Time at 50% Total Activity | mutant/wild-type |
| 9 | L5Q | 32 | 6.4 |
| 58 | M36I | 16 | 3.2 |
| 72 | L47I | 6 | 1.2 |
| 104 | K105S | 8 | 1.6 |
| 110 | K108S | 6 | 1.2 |
| 111 | K108H | 6 | 1.2 |
| 169 | L5D | 22 | 4.4 |
| 170 | L5E | 56 | 11.2 |
| 247 | L5N | 32 | 6.4 |
| 250 | L6E | 56 | 11.2 |
| 253 | L6Q | 54 | 10.8 |
| 254 | L6R | 10 | 2 |
| 255 | L6S | 54 | 10.8 |
| 257 | L9N | 48 | 9.6 |
| 259 | Q10D | 23 | 4.6 |
| 266 | S13D | 30 | 6 |
| 286 | C17N | 10 | 2 |
| 290 | C17T | 10 | 2 |
| 321 | Q94D | 8 | 1.6 |
| 326 | Q94S | 54 | 10.8 |
| 336 | H97D | 36 | 7.2 |
| 369 | N90C | 32 | 6.4 |
| | WT | 5 | 1.0 |

### Example 10

### In Vivo Pharmacokinetics (PK)

[0663] a. Intravenous Administration

[0664] Residual anti-viral (biological) activity of candidate LEADs and native (wild-type, unmodified) IFN-β was measured in plasma samples by assaying protection of HeLa cells from EMCV infection. Briefly, IFN-β wt and mutant polypeptides (generated in 293 EBNA cells and partially purified) were administrated by intravenous (IV) injection route in a volume of 10 mL/kg in 12 male mice (3 mice per group) (22.5 μg/kg dosage). Blood samples were drawn on day 1 between 0.08 and 24 hours post-dose administration. 30 μl of plasma was diluted into 1 mL with culture medium, followed by serial dilution and addition to HeLa cells. After 16 hrs of treatment of HeLa cells with the samples of plasma, the HeLa cells were infected with EMC-Virus. At 48 hrs post-infection, the number of living cells was determined by Methylene blue staining and OD measurement. EC₅₀ and specific activity were calculated for each mutant protein using NEMO (software), see Example 6. Each data point is the outcome of 36 wells (36 points); i.e. serial dilution (12 dilutions), each dilution was made and tested in triplicate. Each data point for PK represents the corresponding EC₅₀. In each experiment, the modified IFN-β polypeptides exhibited increased residual anti-viral activity over a longer period of time compared to the wild-type polypeptide. Table 21 provides exemplary data for the average residual anti-viral activity (U/mL) over time for modified and wild-type IFN-β polypeptides.

TABLE 21

| | Average Residual Anti-Viral Activity (U/mL) | | | | | | | | |
|---|---|---|---|---|---|---|---|---|---|
| Polypeptide | 0.08 hr | 0.25 hr | 0.5 hr | 1 hr | 1.5 hrs | 2 hrs | 3 hrs | 4 hrs | 6 hrs |
| L5D | 28.76 | 17.36 | 7.0 | 4.54 | 4.16 | 2.51 | 1.88 | 1.8 | 0.53 |
| L5E | 45.49 | 25.37 | 12.91 | 9.53 | 3.78 | 2.51 | 2.81 | 2.44 | 1.06 |
| L5N | 23.12 | 11.70 | 10.69 | 6.42 | 3.18 | 1.87 | 2.20 | 1.29 | 0.79 |
| L6Q | 14.98 | 23.06 | 11.79 | 7.31 | 4.98 | 3.82 | 2.54 | 2.33 | 1.90 |
| L5Q | 33.66 | 17.83 | 8.73 | 6.34 | 2.87 | 1.69 | 0.82 | 0.69 | 0.21 |
| K108S | 29.63 | 17.74 | 9.65 | 7.94 | 2.39 | 1.72 | 0.96 | 0.70 | 0.46 |
| Wild- | 17.99 | 6.06 | 2.19 | 0.43 | 0.17 | 0 | 0 | 0 | 0 |
| type* | | | | | | | | | |

*Average anti-viral activity of the wild-type IFN-β polypeptide was only measurable for 1.5 hours after IV administration of the native protein into the mice.

[0665] In Table 22, the pharmacokinetic parameters Ci, AUC and half-life for following IV administration of exemplary IFN-β LEADs in mice are presented. Data are expressed as a ratio between mutant and wild-type IFN-β values. PK parameters were determined using PK solutions® (version 2) software.

TABLE 22
Pharmacokinetic Profile of Exemplary IFN-β LEADS and
(Intravenous Administration)

| | Half-life | C initial (iv) | AUC |
|---|---|---|---|
| Mutant | Mutant/WT | Mutant/WT | Mutant/WT |
| L6Q | 6.1 | 1.01 | 6.2 |
| L5E | 5.3 | 0.95 | 4.9 |
| L5N | 5.6 | 0.85 | 4.7 |
| Q10D | 2.1 | 2.08 | 4.4 |
| L5D | 4.9 | 0.73 | 3.6 |
| L5Q | 4.0 | 0.89 | 3.5 |
| K108S | 4.5 | 0.69 | 3.1 |
| L6E | 1.8 | 1.65 | 2.9 |
| M36I | 2.2 | 1.26 | 2.7 |
| N86Q | 3.0 | 0.84 | 2.5 |
| Q94D | 2.3 | 1.09 | 2.4 |
| K108H | 1.4 | 1.36 | 2.1 |
| L116T | 2.0 | 0.72 | 1.4 |
| C17T | 1.0 | 1.32 | 1.3 |
| H97D | 1.8 | 0.60 | 1.1 |
| K136Q | 1.0 | 1.11 | 1.1 |

[0666] b. Subcutaneous Administration

[0667] Residual anti-viral (biological) activity of candidate LEADs and SuperLEADs and native (wild-type, unmodified) IFN-β also was measured in plasma samples, following subcutaneous (SC) injection, by assaying protection of HeLa cells from EMCV infection. Briefly, IFN-β wt and mutant polypeptides (produced in 293 EBNA cells and partially purified) were administrated by SC injection route in a volume of 10 mL/kg in 12 male mice (3 mice per group) (220 μg/kg dosage). Blood samples were drawn on day 1 between 0.08 and 48 hours post-dose administration. 30 μl of plasma was diluted into 1 mL with culture medium, followed by serial dilution and addition to HeLa cells. After 16 hrs of treatment of HeLa cells with the samples of plasma, the HeLa cells were infected with EMC-Virus. At 48 hrs post-infection, the number of living cells was determined by Methylene blue staining and OD measurement. EC₅₀ and specific activity were calculated for each mutant protein using NEMO (software), see Example 6. Each data point is the outcome of 36 wells (36 points); i.e. serial dilution (12 dilutions), each dilution was made and tested in triplicate. Each data point for PK represents the corresponding EC₅₀. Average anti-viral activity of the wild-type, native IFN-β polypeptide was only measurable for 6 hours after SC administration of the native protein into the mice. In each experiment, the modified IFN-β polypeptides exhibited increased residual anti-viral activity over a longer period of time compared to the wild-type polypeptide.

[0668] In Table 23, the pharmacokinetic parameters, half-life, AUC and Tₘₐₓ, following SC administration of exemplary IFN-β LEADS and Super-LEADs in mice are presented. Data for half-life and AUC are expressed as a ratio between mutant and wild-type IFN-β values. PK parameters were determined using PK solutions® (version 2) software.

TABLE 23
Pharmacokinetic Profile of Exemplary IFN-β LEADS
and Super-LEADs (Subcutaneous Administration)

| | Half-life | AUC_{(0-∞)} | Tₘₐₓ |
|---|---|---|---|
| Mutant | Mutant/WT | Mutant/WT | (h) |
| L5D/L47I | 2.0 | 70.9 | 1 |
| L5D/K108S | 1.4 | 49.6 | 1 |
| L6Q/K108S | 8.1 | 16.7 | 1 |
| K108S | 2.3 | 13.4 | 1 |
| N90C | 5.1 | 10.4 | 1 |
| L6E | 2.3 | 9.1 | 1 |
| L5D/L6Q | 5.0 | 8.4 | 2 |
| K105S | 1.4 | 7.5 | 1 |
| L5Q/L47I | 1.5 | 4.7 | 1 |
| L5N/Q10D | 2.5 | 4.7 | 1 |
| L5N | 1.7 | 4.3 | 1 |
| L5Q/K108S | 1.3 | 3.9 | 1 |
| K108H | 3.4 | 3.9 | 1 |
| L5S | 1.5 | 3.5 | 1 |
| Q94S | 2.4 | 3.2 | 1 |

### Example 11

### IFN-β Induction of Gene Expression

[0669] The ability of IFN-β LEAD and Super-LEAD polypeptides to induce expression of known IFN-β inducible genes in HT-1080 cells was assessed. HT-1080 cells were cultured using DMEM (Invitrogen) supplemented with 10% fetal bovine serum. Cells were plated into 96-well plates at 1×10⁴ cells/well and incubated overnight at 37° C. in a humid atmosphere with a composition of 5% CO2/95% air, before being treated with 1500 pg of IFN-β wild-type (WT) and mutant proteins. After treatment for 16 hours, cells were lysed and total RNA was isolated using RNA extraction kit (Qiagen RNeasy 96 RNA preparation kit, Qiagen) according to the manufacturer's protocol. RNA samples were aliquoted in 96-well plates and stored at −80° C. until use. MxA (myxovirus resistance 1 interferon-inducible protein p78), p69 (2′5′-oligoadenylate synthetase (2′5′ OAS)) and β-R1 (SCYB11) mRNA levels were determined by real time quantitative PCR using an ABI 7900 sequence detector (Applied Biosystems). Quantification of mRNA was measured by using the one step reverse transcription polymerase chain reaction (RT-PCR) kit (First-strand synthesis kit, Applied Biosystems) according to procedure using the comparative Delta Ct method (Perkin Elmer (1997) user bulletin no 2) with GAPDH (glyceraldehyde-3-phosphate dehydrogenase) RNA probe as an endogenous reference (Applied Biosystems). The primers and probe sequences used for each gene are presented below. The data were normalized by expressing the ratio of either MxA, 2′5′ OAS p69 or β-R1 mRNA relative to GAPDH RNA.

For MxA:
Primer MxA-1:

(SEQ ID NO: 661)

5′-AAGGAATGGGAATCAGTCATGAG-3′
Primer MxA-2:

(SEQ ID NO: 662)

5′-TCTATTAGAGTCAGATCCGGGACAT-3′
RT PCR Probe MxA sequence:

(SEQ ID NO: 667)

5′-TCACCCTGGAGATCAGCTCCCGA-3′
For β-R1:
Primers BR1-1:

(SEQ ID NO: 663)

5′-AGGACGCTGTCTTTGCATAGG-3′
Primers BR1-2:

(SEQ ID NO: 664)

5′-ACAGTTGTTACTTGGGTACATTATGGA-3′
RT PCR Probe β-R1 sequence:

(SEQ ID NO: 668)

5′-AAAAGCAGTGAAAGTGGCAGATATTGAGAAAGC-3′
For p69:
Primer P69OAS-1:

(SEQ ID NO: 665)

5′-ATCTCGTCGTGTTCCATAACTCACT-3′
Primer P69OAS-2:

(SEQ ID NO: 666)

5′-GTTCATGGATTTCCTTGACGATTT-3′
RT PCR Probe 2′5′ OAS p69 sequence:

(SEQ ID NO: 669)

5′-CTACACCTCCCAAAAAAACGAGCGGC-3′

[0670] Data for the induction of MxA, β-R1, and p69 gene expression are presented in Table 24 as increased (+), highly increased (+/+), decreased (−), highly decreased (−/−) or equivalent (=) induction of gene expression compared to induction by wild-type IFN-β. All IFN-β LEADs and all IFN-β Super-LEADs except three mutants exhibited strong induction of β-R1 gene expression, with some exemplary LEADs and SuperLEADs exhibiting higher induction of β-R1 compared to induction by wild-type IFN-β as shown in Table 24. All IFN-β LEADs and all IFN-β Super-LEADs exhibited strong induction of MxA and p69 gene expression with some exemplary LEADs and SuperLEADs exhibiting higher induction MxA and p69 compared to induction by wild-type IFN-β as shown in Table 24.

TABLE 24
Induction of MxA, p69, and β-R1 gene expression
by IFN-β LEADs and Super-Leads

| | Comparison with | | | | Comparison with | | |
|---|---|---|---|---|---|---|---|
| | native IFNβ | | | | native IFNβ | | |
| Mutants | BR1 | MxA | P69 | Mutants | BR1 | MxA | P69 |
| L5T | = | = | = | V91C | = | = | = |
| L5Q | + | = | = | L5D/L6E | = | = | − |
| M36I | − | + | + | L5E/Q10D | = | + | = |
| D39G | = | = | = | L5Q/M36I | −/− | = | −/− |
| L47I | = | = | = | L5E/L6E | = | = | − |
| K105S | + | +/+ | + | L5D/Q10D | = | = | = |
| K108S | = | + | = | L5N/M36I | = | + | = |
| K108H | = | = | − | L5D/K108S | = | = | = |
| L116T | = | = | = | L5N/L6E | −/− | − | − |
| K136Q | = | = | = | L5Q/Q10D | +/+ | − | = |
| E137H | + | = | −/− | L6E/M36I | = | = | = |
| L5D | +/+ | − | = | L5E/N86Q | +/+ | − | = |
| L5E | + | = | = | L5Q/K108S | −/− | − | −/− |
| L5N | = | = | = | L5Q/L6E | −/− | − | − |
| L5S | = | = | − | L6Q/M36I | = | = | = |
| L6E | = | = | − | L5D/N86Q | = | + | = |
| L6Q | = | = | − | L5N/K108S | = | + | = |
| L6R | = | + | + | L5D/L6Q | = | + | = |
| L6S | = | = | = | L6E/K108S | = | = | = |
| L9N | = | = | = | L5E/L6Q | = | − | − |
| Q10D | + | = | = | L5D/L47I | −/− | = | = |
| S13D | = | = | = | L5N | + | = | = |
| C17N | = | = | = | L6Q/K108S | = | = | = |
| N86Q | = | = | = | L5N/L6Q | = | = | = |
| N86T | + | = | − | L5E/M36I | = | = | = |
| Q94D | = | +/+ | + | L6E/N86Q | −/− | − | − |
| Q94S | = | = | = | L5D/M36I | +/+ | = | = |
| H97D | − | − | − | L5N/L47I | = | = | = |
| V101S | = | = | = | L6Q/N86Q | = | = | = |
| V101C | = | = | = | NIBSC-IFNα | −/− | = | = |
| N90C | = | = | = | NIBSC-IFNβ | = | − | − |

NIBSC: National Institute for Biological Standard and Controls (UK)

### Example 12

### Stat 3 Phosphorylation Assay

[0671] The ability of IFN-β LEAD and Super-LEAD polypeptides to induce Stat3 phosphorylation in HT-1080 cells was assessed. HT-1080 cells were cultured using DMEM (Invitrogen) supplemented with 10% fetal bovine serum. Cells were plated into 96-well plates at 1×10⁴ cells/well and incubated overnight at 37° C. in a humid atmosphere with a composition of 5% CO₂/95% air, before being treated with 6000 pg of IFN-β wild-type (WT) and mutant proteins. After treatment for 30 minutes, media was removed and cells were rinsed once with ice-cold PBS. Cell lysates were obtained by adding 100 μl of ice-cold cell lysis buffer plus 1 mM phenylmethylsulfonyl fluoride (PMSF) to each well and the plates were incubated on ice for 5 minutes. Cells were scraped off the plate and transfer to a new 96-well-plate. An additional step of cell disruption was performed by several cycles of freezing/thawing. The cell lysate was centrifugated for 10 minutes at 4° C., and supernatant aliquoted and stored at −80° C. until use. Phosphorylation of Stat3 was detected by ELISA kit (PathScan Phospho-Stat3 Sandwitch Elisa Kit, Cell Signalling) according to manufacturer protocol.

[0672] Exemplary data for induction of Stat3 phosphorylation is presented in Table 25 as increased (+), decreased (−), or equivalent (=) induction of Stat3 phosphorylation compared to induction by wild-type IFN-β. All IFN-β LEADs and all IFN-β Super-LEADs exhibited strong induction of STAT3 phosphorylation with some exemplary LEADs and SuperLEADs exhibiting higher phosphorylation of STAT3 compared to induction by wild-type IFN-β as shown in Table 25.

TABLE 25
Induction of STAT3 Phosphorylation by IFN-β LEADs and Super-Leads

| | Comparison | | Comparison |
|---|---|---|---|
| | with native IFNβ | | with native IFNβ |
| Mutants | Stat3 phosphorylation | Mutants | Stat3 phosphorylation |
| L5T | + | V91C | = |
| L5Q | + | L5D/L6E | = |
| M36I | + | L5E/Q10D | = |
| D39G | = | L5Q/M36I | = |
| L47I | = | L5E/L6E | = |
| K105S | = | L5D/Q10D | = |
| K108S | = | L5N/M36I | = |
| K108H | + | L5D/K108S | = |
| L116T | = | L5N/L6E | = |
| K136Q | = | L5Q/Q10D | = |
| E137H | = | L6E/M36I | = |
| L5D | + | L5E/N86Q | = |
| L5E | + | L5Q/K108S | = |
| L5N | = | L5Q/L6E | = |
| L5S | = | L6Q/M36I | = |
| L6E | = | L5D/N86Q | = |
| L6Q | = | L5N/K108S | = |
| L6R | + | L5D/L6Q | = |
| L6S | = | L6E/K108S | = |
| L9N | + | L5E/L6Q | = |
| Q10D | = | L5D/L47I | = |
| S13D | = | L5N | = |
| C17N | = | L6Q/K108S | = |
| N86Q | + | L5N/L6Q | = |
| N86T | = | L5E/M36I | = |
| Q94D | = | L6E/N86Q | = |
| Q94S | = | L5D/M36I | = |
| H97D | = | L5N/L47I | = |
| V101S | = | L6Q/N86Q | = |
| V101C | = | NIBSC-IFNα | = |
| N90C | = | NIBSC-IFNβ | nd |

NIBIC: National Institute for Biological Standard and Controls (UK)

[0673] Since modifications will be apparent to those of skill in this art, it is intended that this invention be limited only by the scope of the appended claims.

The application's sequence listing, which the Patent Office published only in electronic form, follows.

SEQUENCE LISTING (669 sequences)

SEQ ID NO: 1 - protein, 166 aa, Homo sapiens
MSYNLLGFLQRSSNFQCQKLLWQLNGRLEYCLKDRMNFDIPEEIKQLQQFQKEDAALTIYEMLQNIFAIFRQDSSSTGWNETIVENLLANVYHQINHLKTVLEEKLEKEDFTRGKLMSSLHLKRYYGRILHYLKAKEYSHCAWTIVRVEILRNFYFINRLTGYLRN

SEQ ID NO: 2 - protein, 187 aa, Homo sapiens
MTNKCLLQIALLLCFSTTALSMSYNLLGFLQRSSNFQCQKLLWQLNGRLEYCLKDRMNFDIPEEIKQLQQFQKEDAALTIYEMLQNIFAIFRQDSSSTGWNETIVENLLANVYHQINHLKTVLEEKLEKEDFTRGKLMSSLHLKRYYGRILHYLKAKEYSHCAWTIVRVEILRNFYFINRLTGYLRN

SEQ ID NO: 3 - protein, 165 aa, Homo Sapiens
SYNLLGFLQRSSNFQSQKLLWQLNGRLEYCLKDRMNFDIPEEIKQLQQFQKEDAALTIYEMLQNIFAIFRQDSSSTGWNETIVENLLANVYHQINHLKTVLEEKLEKEDFTRGKLMSSLHLKRYYGRILHYLKAKEYSHCAWTIVRVEILRNFYFINRLTGYLRN

SEQ ID NO: 4 - protein, 166 aa, Homo sapiens
  Y3H
MSHNLLGFLQRSSNFQCQKLLWQLNGRLEYCLKDRMNFDIPEEIKQLQQFQKEDAALTIYEMLQNIFAIFRQDSSSTGWNETIVENLLANVYHQINHLKTVLEEKLEKEDFTRGKLMSSLHLKRYYGRILHYLKAKEYSHCAWTIVRVEILRNFYFINRLTGYLRN

SEQ ID NO: 5 - protein, 166 aa, Homo sapiens
  Y3I
MSINLLGFLQRSSNFQCQKLLWQLNGRLEYCLKDRMNFDIPEEIKQLQQFQKEDAALTIYEMLQNIFAIFRQDSSSTGWNETIVENLLANVYHQINHLKTVLEEKLEKEDFTRGKLMSSLHLKRYYGRILHYLKAKEYSHCAWTIVRVEILRNFYFINRLTGYLRN

SEQ ID NO: 6 - protein, 166 aa, Homo sapiens
  L6I
MSYNLIGFLQRSSNFQCQKLLWQLNGRLEYCLKDRMNFDIPEEIKQLQQFQKEDAALTIYEMLQNIFAIFRQDSSSTGWNETIVENLLANVYHQINHLKTVLEEKLEKEDFTRGKLMSSLHLKRYYGRILHYLKAKEYSHCAWTIVRVEILRNFYFINRLTGYLRN

SEQ ID NO: 7 - protein, 166 aa, Homo sapiens
  L6V
MSYNLVGFLQRSSNFQCQKLLWQLNGRLEYCLKDRMNFDIPEEIKQLQQFQKEDAALTIYEMLQNIFAIFRQDSSSTGWNETIVENLLANVYHQINHLKTVLEEKLEKEDFTRGKLMSSLHLKRYYGRILHYLKAKEYSHCAWTIVRVEILRNFYFINRLTGYLRN

SEQ ID NO: 8 - protein, 166 aa, Homo sapiens
  L20I
MSYNLLGFLQRSSNFQCQKILWQLNGRLEYCLKDRMNFDIPEEIKQLQQFQKEDAALTIYEMLQNIFAIFRQDSSSTGWNETIVENLLANVYHQINHLKTVLEEKLEKEDFTRGKLMSSLHLKRYYGRILHYLKAKEYSHCAWTIVRVEILRNFYFINRLTGYLRN

SEQ ID NO: 9 - protein, 166 aa, Homo sapiens
  L20V
MSYNLLGFLQRSSNFQCQKVLWQLNGRLEYCLKDRMNFDIPEEIKQLQQFQKEDAALTIYEMLQNIFAIFRQDSSSTGWNETIVENLLANVYHQINHLKTVLEEKLEKEDFTRGKLMSSLHLKRYYGRILHYLKAKEYSHCAWTIVRVEILRNFYFINRLTGYLRN

SEQ ID NO: 10 - protein, 166 aa, Homo sapiens
  L21I
MSYNLLGFLQRSSNFQCQKLIWQLNGRLEYCLKDRMNFDIPEEIKQLQQFQKEDAALTIYEMLQNIFAIFRQDSSSTGWNETIVENLLANVYHQINHLKTVLEEKLEKEDFTRGKLMSSLHLKRYYGRILHYLKAKEYSHCAWTIVRVEILRNFYFINRLTGYLRN

SEQ ID NO: 11 - protein, 166 aa, Homo sapiens
  L21V
MSYNLLGFLQRSSNFQCQKLVWQLNGRLEYCLKDRMNFDIPEEIKQLQQFQKEDAALTIYEMLQNIFAIFRQDSSSTGWNETIVENLLANVYHQINHLKTVLEEKLEKEDFTRGKLMSSLHLKRYYGRILHYLKAKEYSHCAWTIVRVEILRNFYFINRLTGYLRN

SEQ ID NO: 12 - protein, 166 aa, Homo sapiens
  L24I
MSYNLLGFLQRSSNFQCQKLLWQINGRLEYCLKDRMNFDIPEEIKQLQQFQKEDAALTIYEMLQNIFAIFRQDSSSTGWNETIVENLLANVYHQINHLKTVLEEKLEKEDFTRGKLMSSLHLKRYYGRILHYLKAKEYSHCAWTIVRVEILRNFYFINRLTGYLRN

SEQ ID NO: 13 - protein, 166 aa, Homo sapiens
  L24V
MSYNLLGFLQRSSNFQCQKLLWQVNGRLEYCLKDRMNFDIPEEIKQLQQFQKEDAALTIYEMLQNIFAIFRQDSSSTGWNETIVENLLANVYHQINHLKTVLEEKLEKEDFTRGKLMSSLHLKRYYGRILHYLKAKEYSHCAWTIVRVEILRNFYFINRLTGYLRN

SEQ ID NO: 14 - protein, 166 aa, Homo sapiens
  D34N
MSYNLLGFLQRSSNFQCQKLLWQLNGRLEYCLKNRMNFDIPEEIKQLQQFQKEDAALTIYEMLQNIFAIFRQDSSSTGWNETIVENLLANVYHQINHLKTVLEEKLEKEDFTRGKLMSSLHLKRYYGRILHYLKAKEYSHCAWTIVRVEILRNFYFINRLTGYLRN

SEQ ID NO: 15 - protein, 166 aa, Homo sapiens
  D34Q
MSYNLLGFLQRSSNFQCQKLLWQLNGRLEYCLKQRMNFDIPEEIKQLQQFQKEDAALTIYEMLQNIFAIFRQDSSSTGWNETIVENLLANVYHQINHLKTVLEEKLEKEDFTRGKLMSSLHLKRYYGRILHYLKAKEYSHCAWTIVRVEILRNFYFINRLTGYLRN

SEQ ID NO: 16 - protein, 166 aa, Homo sapiens
  F38I
MSYNLLGFLQRSSNFQCQKLLWQLNGRLEYCLKDRMNIDIPEEIKQLQQFQKEDAALTIYEMLQNIFAIFRQDSSSTGWNETIVENLLANVYHQINHLKTVLEEKLEKEDFTRGKLMSSLHLKRYYGRILHYLKAKEYSHCAWTIVRVEILRNFYFINRLTGYLRN

SEQ ID NO: 17 - protein, 166 aa, Homo sapiens
  F38V
MSYNLLGFLQRSSNFQCQKLLWQLNGRLEYCLKDRMNVDIPEEIKQLQQFQKEDAALTIYEMLQNIFAIFRQDSSSTGWNETIVENLLANVYHQINHLKTVLEEKLEKEDFTRGKLMSSLHLKRYYGRILHYLKAKEYSHCAWTIVRVEILRNFYFINRLTGYLRN

SEQ ID NO: 18 - protein, 166 aa, Homo sapiens
  P41A
MSYNLLGFLQRSSNFQCQKLLWQLNGRLEYCLKDRMNFDIAEEIKQLQQFQKEDAALTIYEMLQNIFAIFRQDSSSTGWNETIVENLLANVYHQINHLKTVLEEKLEKEDFTRGKLMSSLHLKRYYGRILHYLKAKEYSHCAWTIVRVEILRNFYFINRLTGYLRN

SEQ ID NO: 19 - protein, 166 aa, Homo sapiens
  P41S
MSYNLLGFLQRSSNFQCQKLLWQLNGRLEYCLKDRMNFDISEEIKQLQQFQKEDAALTIYEMLQNIFAIFRQDSSSTGWNETIVENLLANVYHQINHLKTVLEEKLEKEDFTRGKLMSSLHLKRYYGRILHYLKAKEYSHCAWTIVRVEILRNFYFINRLTGYLRN

SEQ ID NO: 20 - protein, 166 aa, Homo sapiens
  E43Q
MSYNLLGFLQRSSNFQCQKLLWQLNGRLEYCLKDRMNFDIPEQIKQLQQFQKEDAALTIYEMLQNIFAIFRQDSSSTGWNETIVENLLANVYHQINHLKTVLEEKLEKEDFTRGKLMSSLHLKRYYGRILHYLKAKEYSHCAWTIVRVEILRNFYFINRLTGYLRN

SEQ ID NO: 21 - protein, 166 aa, Homo sapiens
  E43H
MSYNLLGFLQRSSNFQCQKLLWQLNGRLEYCLKDRMNFDIPEHIKQLQQFQKEDAALTIYEMLQNIFAIFRQDSSSTGWNETIVENLLANVYHQINHLKTVLEEKLEKEDFTRGKLMSSLHLKRYYGRILHYLKAKEYSHCAWTIVRVEILRNFYFINRLTGYLRN

SEQ ID NO: 22 - protein, 166 aa, Homo sapiens
  E43N
MSYNLLGFLQRSSNFQCQKLLWQLNGRLEYCLKDRMNFDIPENIKQLQQFQKEDAALTIYEMLQNIFAIFRQDSSSTGWNETIVENLLANVYHQINHLKTVLEEKLEKEDFTRGKLMSSLHLKRYYGRILHYLKAKEYSHCAWTIVRVEILRNFYFINRLTGYLRN

SEQ ID NO: 23 - protein, 166 aa, Homo sapiens
  F50I
MSYNLLGFLQRSSNFQCQKLLWQLNGRLEYCLKDRMNFDIPEEIKQLQQIQKEDAALTIYEMLQNIFAIFRQDSSSTGWNETIVENLLANVYHQINHLKTVLEEKLEKEDFTRGKLMSSLHLKRYYGRILHYLKAKEYSHCAWTIVRVEILRNFYFINRLTGYLRN

SEQ ID NO: 24 - protein, 166 aa, Homo sapiens
  F50V
MSYNLLGFLQRSSNFQCQKLLWQLNGRLEYCLKDRMNFDIPEEIKQLQQVQKEDAALTIYEMLQNIFAIFRQDSSSTGWNETIVENLLANVYHQINHLKTVLEEKLEKEDFTRGKLMSSLHLKRYYGRILHYLKAKEYSHCAWTIVRVEILRNFYFINRLTGYLRN

SEQ ID NO: 25 - protein, 166 aa, Homo sapiens
  E53Q
MSYNLLGFLQRSSNFQCQKLLWQLNGRLEYCLKDRMNFDIPEEIKQLQQFQKQDAALTIYEMLQNIFAIFRQDSSSTGWNETIVENLLANVYHQINHLKTVLEEKLEKEDFTRGKLMSSLHLKRYYGRILHYLKAKEYSHCAWTIVRVEILRNFYFINRLTGYLRN

SEQ ID NO: 26 - protein, 166 aa, Homo sapiens
  E53H
MSYNLLGFLQRSSNFQCQKLLWQLNGRLEYCLKDRMNFDIPEEIKQLQQFQKHDAALTIYEMLQNIFAIFRQDSSSTGWNETIVENLLANVYHQINHLKTVLEEKLEKEDFTRGKLMSSLHLKRYYGRILHYLKAKEYSHCAWTIVRVEILRNFYFINRLTGYLRN

SEQ ID NO: 27 - protein, 166 aa, Homo sapiens
  E53N
MSYNLLGFLQRSSNFQCQKLLWQLNGRLEYCLKDRMNFDIPEEIKQLQQFQKNDAALTIYEMLQNIFAIFRQDSSSTGWNETIVENLLANVYHQINHLKTVLEEKLEKEDFTRGKLMSSLHLKRYYGRILHYLKAKEYSHCAWTIVRVEILRNFYFINRLTGYLRN

SEQ ID NO: 28 - protein, 166 aa, Homo sapiens
  D54N
MSYNLLGFLQRSSNFQCQKLLWQLNGRLEYCLKDRMNFDIPEEIKQLQQFQKENAALTIYEMLQNIFAIFRQDSSSTGWNETIVENLLANVYHQINHLKTVLEEKLEKEDFTRGKLMSSLHLKRYYGRILHYLKAKEYSHCAWTIVRVEILRNFYFINRLTGYLRN

SEQ ID NO: 29 - protein, 166 aa, Homo sapiens
  D54Q
MSYNLLGFLQRSSNFQCQKLLWQLNGRLEYCLKDRMNFDIPEEIKQLQQFQKEQAALTIYEMLQNIFAIFRQDSSSTGWNETIVENLLANVYHQINHLKTVLEEKLEKEDFTRGKLMSSLHLKRYYGRILHYLKAKEYSHCAWTIVRVEILRNFYFINRLTGYLRN

SEQ ID NO: 30 - protein, 166 aa, Homo sapiens
  L57I
MSYNLLGFLQRSSNFQCQKLLWQLNGRLEYCLKDRMNFDIPEEIKQLQQFQKEDAAITIYEMLQNIFAIFRQDSSSTGWNETIVENLLANVYHQINHLKTVLEEKLEKEDFTRGKLMSSLHLKRYYGRILHYLKAKEYSHCAWTIVRVEILRNFYFINRLTGYLRN

SEQ ID NO: 31 - protein, 166 aa, Homo sapiens
  L57V
MSYNLLGFLQRSSNFQCQKLLWQLNGRLEYCLKDRMNFDIPEEIKQLQQFQKEDAAVTIYEMLQNIFAIFRQDSSSTGWNETIVENLLANVYHQINHLKTVLEEKLEKEDFTRGKLMSSLHLKRYYGRILHYLKAKEYSHCAWTIVRVEILRNFYFINRLTGYLRN

SEQ ID NO: 32 - protein, 166 aa, Homo sapiens
  Y60H
MSYNLLGFLQRSSNFQCQKLLWQLNGRLEYCLKDRMNFDIPEEIKQLQQFQKEDAALTIHEMLQNIFAIFRQDSSSTGWNETIVENLLANVYHQINHLKTVLEEKLEKEDFTRGKLMSSLHLKRYYGRILHYLKAKEYSHCAWTIVRVEILRNFYFINRLTGYLRN

SEQ ID NO: 33 - protein, 166 aa, Homo sapiens
  Y60I
MSYNLLGFLQRSSNFQCQKLLWQLNGRLEYCLKDRMNFDIPEEIKQLQQFQKEDAALTIIEMLQNIFAIFRQDSSSTGWNETIVENLLANVYHQINHLKTVLEEKLEKEDFTRGKLMSSLHLKRYYGRILHYLKAKEYSHCAWTIVRVEILRNFYFINRLTGYLRN

SEQ ID NO: 34 - protein, 166 aa, Homo sapiens
  E61Q
MSYNLLGFLQRSSNFQCQKLLWQLNGRLEYCLKDRMNFDIPEEIKQLQQFQKEDAALTIYQMLQNIFAIFRQDSSSTGWNETIVENLLANVYHQINHLKTVLEEKLEKEDFTRGKLMSSLHLKRYYGRILHYLKAKEYSHCAWTIVRVEILRNFYFINRLTGYLRN

SEQ ID NO: 35 - protein, 166 aa, Homo sapiens
  E61H
MSYNLLGFLQRSSNFQCQKLLWQLNGRLEYCLKDRMNFDIPEEIKQLQQFQKEDAALTIYHMLQNIFAIFRQDSSSTGWNETIVENLLANVYHQINHLKTVLEEKLEKEDFTRGKLMSSLHLKRYYGRILHYLKAKEYSHCAWTIVRVEILRNFYFINRLTGYLRN

SEQ ID NO: 36 - protein, 166 aa, Homo sapiens
  E61N
MSYNLLGFLQRSSNFQCQKLLWQLNGRLEYCLKDRMNFDIPEEIKQLQQFQKEDAALTIYNMLQNIFAIFRQDSSSTGWNETIVENLLANVYHQINHLKTVLEEKLEKEDFTRGKLMSSLHLKRYYGRILHYLKAKEYSHCAWTIVRVEILRNFYFINRLTGYLRN

SEQ ID NO: 37 - protein, 166 aa, Homo sapiens
  M62I
MSYNLLGFLQRSSNFQCQKLLWQLNGRLEYCLKDRMNFDIPEEIKQLQQFQKEDAALTIYEILQNIFAIFRQDSSSTGWNETIVENLLANVYHQINHLKTVLEEKLEKEDFTRGKLMSSLHLKRYYGRILHYLKAKEYSHCAWTIVRVEILRNFYFINRLTGYLRN

SEQ ID NO: 38 - protein, 166 aa, Homo sapiens
  M62V
MSYNLLGFLQRSSNFQCQKLLWQLNGRLEYCLKDRMNFDIPEEIKQLQQFQKEDAALTIYEVLQNIFAIFRQDSSSTGWNETIVENLLANVYHQINHLKTVLEEKLEKEDFTRGKLMSSLHLKRYYGRILHYLKAKEYSHCAWTIVRVEILRNFYFINRLTGYLRN

SEQ ID NO: 39 - protein, 166 aa, Homo sapiens
  L63I
MSYNLLGFLQRSSNFQCQKLLWQLNGRLEYCLKDRMNFDIPEEIKQLQQFQKEDAALTIYEMIQNIFAIFRQDSSSTGWNETIVENLLANVYHQINHLKTVLEEKLEKEDFTRGKLMSSLHLKRYYGRILHYLKAKEYSHCAWTIVRVEILRNFYFINRLTGYLRN

SEQ ID NO: 40 - protein, 166 aa, Homo sapiens
  L63V
MSYNLLGFLQRSSNFQCQKLLWQLNGRLEYCLKDRMNFDIPEEIKQLQQFQKEDAALTIYEMVQNIFAIFRQDSSSTGWNETIVENLLANVYHQINHLKTVLEEKLEKEDFTRGKLMSSLHLKRYYGRILHYLKAKEYSHCAWTIVRVEILRNFYFINRLTGYLRN

SEQ ID NO: 41 - protein, 166 aa, Homo sapiens
  F70I
MSYNLLGFLQRSSNFQCQKLLWQLNGRLEYCLKDRMNFDIPEEIKQLQQFQKEDAALTIYEMLQNIFAIIRQDSSSTGWNETIVENLLANVYHQINHLKTVLEEKLEKEDFTRGKLMSSLHLKRYYGRILHYLKAKEYSHCAWTIVRVEILRNFYFINRLTGYLRN

SEQ ID NO: 42 - protein, 166 aa, Homo sapiens
  F70V
MSYNLLGFLQRSSNFQCQKLLWQLNGRLEYCLKDRMNFDIPEEIKQLQQFQKEDAALTIYEMLQNIFAIVRQDSSSTGWNETIVENLLANVYHQINHLKTVLEEKLEKEDFTRGKLMSSLHLKRYYGRILHYLKAKEYSHCAWTIVRVEILRNFYFINRLTGYLRN

SEQ ID NO: 43 - protein, 166 aa, Homo sapiens
  W79H
MSYNLLGFLQRSSNFQCQKLLWQLNGRLEYCLKDRMNFDIPEEIKQLQQFQKEDAALTIYEMLQNIFAIFRQDSSSTGHNETIVENLLANVYHQINHLKTVLEEKLEKEDFTRGKLMSSLHLKRYYGRILHYLKAKEYSHCAWTIVRVEILRNFYFINRLTGYLRN

SEQ ID NO: 44 - protein, 166 aa, Homo sapiens
  W79S
MSYNLLGFLQRSSNFQCQKLLWQLNGRLEYCLKDRMNFDIPEEIKQLQQFQKEDAALTIYEMLQNIFAIFRQDSSSTGSNETIVENLLANVYHQINHLKTVLEEKLEKEDFTRGKLMSSLHLKRYYGRILHYLKAKEYSHCAWTIVRVEILRNFYFINRLTGYLRN

SEQ ID NO: 45 - protein, 166 aa, Homo sapiens
  L87I
MSYNLLGFLQRSSNFQCQKLLWQLNGRLEYCLKDRMNFDIPEEIKQLQQFQKEDAALTIYEMLQNIFAIFRQDSSSTGWNETIVENILANVYHQINHLKTVLEEKLEKEDFTRGKLMSSLHLKRYYGRILHYLKAKEYSHCAWTIVRVEILRNFYFINRLTGYLRN

SEQ ID NO: 46 - protein, 166 aa, Homo sapiens
  L87V
MSYNLLGFLQRSSNFQCQKLLWQLNGRLEYCLKDRMNFDIPEEIKQLQQFQKEDAALTIYEMLQNIFAIFRQDSSSTGWNETIVENVLANVYHQINHLKTVLEEKLEKEDFTRGKLMSSLHLKRYYGRILHYLKAKEYSHCAWTIVRVEILRNFYFINRLTGYLRN

SEQ ID NO: 47 - protein, 166 aa, Homo sapiens
  L88I
MSYNLLGFLQRSSNFQCQKLLWQLNGRLEYCLKDRMNFDIPEEIKQLQQFQKEDAALTIYEMLQNIFAIFRQDSSSTGWNETIVENLIANVYHQINHLKTVLEEKLEKEDFTRGKLMSSLHLKRYYGRILHYLKAKEYSHCAWTIVRVEILRNFYFINRLTGYLRN

SEQ ID NO: 48 - protein, 166 aa, Homo sapiens
  L88V
MSYNLLGFLQRSSNFQCQKLLWQLNGRLEYCLKDRMNFDIPEEIKQLQQFQKEDAALTIYEMLQNIFAIFRQDSSSTGWNETIVENLVANVYHQINHLKTVLEEKLEKEDFTRGKLMSSLHLKRYYGRILHYLKAKEYSHCAWTIVRVEILRNFYFINRLTGYLRN

SEQ ID NO: 49 - protein, 166 aa, Homo sapiens
  L98I
MSYNLLGFLQRSSNFQCQKLLWQLNGRLEYCLKDRMNFDIPEEIKQLQQFQKEDAALTIYEMLQNIFAIFRQDSSSTGWNETIVENLLANVYHQINHIKTVLEEKLEKEDFTRGKLMSSLHLKRYYGRILHYLKAKEYSHCAWTIVRVEILRNFYFINRLTGYLRN

SEQ ID NO: 50 - protein, 166 aa, Homo sapiens
  L98V
MSYNLLGFLQRSSNFQCQKLLWQLNGRLEYCLKDRMNFDIPEEIKQLQQFQKEDAALTIYEMLQNIFAIFRQDSSSTGWNETIVENLLANVYHQINHVKTVLEEKLEKEDFTRGKLMSSLHLKRYYGRILHYLKAKEYSHCAWTIVRVEILRNFYFINRLTGYLRN

SEQ ID NO: 51 - protein, 166 aa, Homo sapiens
  L102I
MSYNLLGFLQRSSNFQCQKLLWQLNGRLEYCLKDRMNFDIPEEIKQLQQFQKEDAALTIYEMLQNIFAIFRQDSSSTGWNETIVENLLANVYHQINHLKTVIEEKLEKEDFTRGKLMSSLHLKRYYGRILHYLKAKEYSHCAWTIVRVEILRNFYFINRLTGYLRN

SEQ ID NO: 52 - protein, 166 aa, Homo sapiens
  L102V
MSYNLLGFLQRSSNFQCQKLLWQLNGRLEYCLKDRMNFDIPEEIKQLQQFQKEDAALTIYEMLQNIFAIFRQDSSSTGWNETIVENLLANVYHQINHLKTVVEEKLEKEDFTRGKLMSSLHLKRYYGRILHYLKAKEYSHCAWTIVRVEILRNFYFINRLTGYLRN

SEQ ID NO: 53 - protein, 166 aa, Homo sapiens
  L106I
MSYNLLGFLQRSSNFQCQKLLWQLNGRLEYCLKDRMNFDIPEEIKQLQQFQKEDAALTIYEMLQNIFAIFRQDSSSTGWNETIVENLLANVYHQINHLKTVLEEKIEKEDFTRGKLMSSLHLKRYYGRILHYLKAKEYSHCAWTIVRVEILRNFYFINRLTGYLRN

SEQ ID NO: 54 - protein, 166 aa, Homo sapiens
  L106V
MSYNLLGFLQRSSNFQCQKLLWQLNGRLEYCLKDRMNFDIPEEIKQLQQFQKEDAALTIYEMLQNIFAIFRQDSSSTGWNETIVENLLANVYHQINHLKTVLEEKVEKEDFTRGKLMSSLHLKRYYGRILHYLKAKEYSHCAWTIVRVEILRNFYFINRLTGYLRN

SEQ ID NO: 55 - protein, 166 aa, Homo sapiens
  K115N
MSYNLLGFLQRSSNFQCQKLLWQLNGRLEYCLKDRMNFDIPEEIKQLQQFQKEDAALTIYEMLQNIFAIFRQDSSSTGWNETIVENLLANVYHQINHLKTVLEEKLEKEDFTRGNLMSSLHLKRYYGRILHYLKAKEYSHCAWTIVRVEILRNFYFINRLTGYLRN

SEQ ID NO: 56 - protein, 166 aa, Homo sapiens
  K115Q
MSYNLLGFLQRSSNFQCQKLLWQLNGRLEYCLKDRMNFDIPEEIKQLQQFQKEDAALTIYEMLQNIFAIFRQDSSSTGWNETIVENLLANVYHQINHLKTVLEEKLEKEDFTRGQLMSSLHLKRYYGRILHYLKAKEYSHCAWTIVRVEILRNFYFINRLTGYLRN

SEQ ID NO: 57 - protein, 166 aa, Homo sapiens
  M117I
MSYNLLGFLQRSSNFQCQKLLWQLNGRLEYCLKDRMNFDIPEEIKQLQQFQKEDAALTIYEMLQNIFAIFRQDSSSTGWNETIVENLLANVYHQINHLKTVLEEKLEKEDFTRGKLISSLHLKRYYGRILHYLKAKEYSHCAWTIVRVEILRNFYFINRLTGYLRN

SEQ ID NO: 58 - protein, 166 aa, Homo sapiens
  M117V
MSYNLLGFLQRSSNFQCQKLLWQLNGRLEYCLKDRMNFDIPEEIKQLQQFQKEDAALTIYEMLQNIFAIFRQDSSSTGWNETIVENLLANVYHQINHLKTVLEEKLEKEDFTRGKLVSSLHLKRYYGRILHYLKAKEYSHCAWTIVRVEILRNFYFINRLTGYLRN

SEQ ID NO: 59 - protein, 166 aa, Homo sapiens
  L122I
MSYNLLGFLQRSSNFQCQKLLWQLNGRLEYCLKDRMNFDIPEEIKQLQQFQKEDAALTIYEMLQNIFAIFRQDSSSTGWNETIVENLLANVYHQINHLKTVLEEKLEKEDFTRGKLMSSLHIKRYYGRILHYLKAKEYSHCAWTIVRVEILRNFYFINRLTGYLRN

SEQ ID NO: 60 - protein, 166 aa, Homo sapiens
  L122V
MSYNLLGFLQRSSNFQCQKLLWQLNGRLEYCLKDRMNFDIPEEIKQLQQFQKEDAALTIYEMLQNIFAIFRQDSSSTGWNETIVENLLANVYHQINHLKTVLEEKLEKEDFTRGKLMSSLHVKRYYGRILHYLKAKEYSHCAWTIVRVEILRNFYFINRLTGYLRN

SEQ ID NO: 61 - protein, 166 aa, Homo sapiens
  Y125H
MSYNLLGFLQRSSNFQCQKLLWQLNGRLEYCLKDRMNFDIPEEIKQLQQFQKEDAALTIYEMLQNIFAIFRQDSSSTGWNETIVENLLANVYHQINHLKTVLEEKLEKEDFTRGKLMSSLHLKRHYGRILHYLKAKEYSHCAWTIVRVEILRNFYFINRLTGYLRN

SEQ ID NO: 62 - protein, 166 aa, Homo sapiens
  Y125I
MSYNLLGFLQRSSNFQCQKLLWQLNGRLEYCLKDRMNFDIPEEIKQLQQFQKEDAALTIYEMLQNIFAIFRQDSSSTGWNETIVENLLANVYHQINHLKTVLEEKLEKEDFTRGKLMSSLHLKRIYGRILHYLKAKEYSHCAWTIVRVEILRNFYFINRLTGYLRN

SEQ ID NO: 63 - protein, 166 aa, Homo sapiens
  Y126H
MSYNLLGFLQRSSNFQCQKLLWQLNGRLEYCLKDRMNFDIPEEIKQLQQFQKEDAALTIYEMLQNIFAIFRQDSSSTGWNETIVENLLANVYHQINHLKTVLEEKLEKEDFTRGKLMSSLHLKRYHGRILHYLKAKEYSHCAWTIVRVEILRNFYFINRLTGYLRN

SEQ ID NO: 64 - protein, 166 aa, Homo sapiens
  Y126I
MSYNLLGFLQRSSNFQCQKLLWQLNGRLEYCLKDRMNFDIPEEIKQLQQFQKEDAALTIYEMLQNIFAIFRQDSSSTGWNETIVENLLANVYHQINHLKTVLEEKLEKEDFTRGKLMSSLHLKRYIGRILHYLKAKEYSHCAWTIVRVEILRNFYFINRLTGYLRN

SEQ ID NO: 65 - protein, 166 aa, Homo sapiens
  Y132H
MSYNLLGFLQRSSNFQCQKLLWQLNGRLEYCLKDRMNFDIPEEIKQLQQFQKEDAALTIYEMLQNIFAIFRQDSSSTGWNETIVENLLANVYHQINHLKTVLEEKLEKEDFTRGKLMSSLHLKRYYGRILHHLKAKEYSHCAWTIVRVEILRNFYFINRLTGYLRN

SEQ ID NO: 66 - protein, 166 aa, Homo sapiens
  Y132I
MSYNLLGFLQRSSNFQCQKLLWQLNGRLEYCLKDRMNFDIPEEIKQLQQFQKEDAALTIYEMLQNIFAIFRQDSSSTGWNETIVENLLANVYHQINHLKTVLEEKLEKEDFTRGKLMSSLHLKRYYGRILHILKAKEYSHCAWTIVRVEILRNFYFINRLTGYLRN

SEQ ID NO: 67 - protein, 166 aa, Homo sapiens
  L133I
MSYNLLGFLQRSSNFQCQKLLWQLNGRLEYCLKDRMNFDIPEEIKQLQQFQKEDAALTIYEMLQNIFAIFRQDSSSTGWNETIVENLLANVYHQINHLKTVLEEKLEKEDFTRGKLMSSLHLKRYYGRILHYIKAKEYSHCAWTIVRVEILRNFYFINRLTGYLRN

SEQ ID NO: 68 - protein, 166 aa, Homo sapiens
  L133V
MSYNLLGFLQRSSNFQCQKLLWQLNGRLEYCLKDRMNFDIPEEIKQLQQFQKEDAALTIYEMLQNIFAIFRQDSSSTGWNETIVENLLANVYHQINHLKTVLEEKLEKEDFTRGKLMSSLHLKRYYGRILHYVKAKEYSHCAWTIVRVEILRNFYFINRLTGYLRN

SEQ ID NO: 69 - protein, 166 aa, Homo sapiens
  Y138H
MSYNLLGFLQRSSNFQCQKLLWQLNGRLEYCLKDRMNFDIPEEIKQLQQFQKEDAALTIYEMLQNIFAIFRQDSSSTGWNETIVENLLANVYHQINHLKTVLEEKLEKEDFTRGKLMSSLHLKRYYGRILHYLKAKEHSHCAWTIVRVEILRNFYFINRLTGYLRN

SEQ ID NO: 70 - protein, 166 aa, Homo sapiens
  Y138I
MSYNLLGFLQRSSNFQCQKLLWQLNGRLEYCLKDRMNFDIPEEIKQLQQFQKEDAALTIYEMLQNIFAIFRQDSSSTGWNETIVENLLANVYHQINHLKTVLEEKLEKEDFTRGKLMSSLHLKRYYGRILHYLKAKEISHCAWTIVRVEILRNFYFINRLTGYLRN

SEQ ID NO: 71 - protein, 166 aa, Homo sapiens
  W143H
MSYNLLGFLQRSSNFQCQKLLWQLNGRLEYCLKDRMNFDIPEEIKQLQQFQKEDAALTIYEMLQNIFAIFRQDSSSTGWNETIVENLLANVYHQINHLKTVLEEKLEKEDFTRGKLMSSLHLKRYYGRILHYLKAKEYSHCAHTIVRVEILRNFYFINRLTGYLRN

SEQ ID NO: 72 - protein, 166 aa, Homo sapiens
  W143S
MSYNLLGFLQRSSNFQCQKLLWQLNGRLEYCLKDRMNFDIPEEIKQLQQFQKEDAALTIYEMLQNIFAIFRQDSSSTGWNETIVENLLANVYHQINHLKTVLEEKLEKEDFTRGKLMSSLHLKRYYGRILHYLKAKEYSHCASTIVRVEILRNFYFINRLTGYLRN

SEQ ID NO: 73 - protein, 166 aa, Homo sapiens
  R147H
MSYNLLGFLQRSSNFQCQKLLWQLNGRLEYCLKDRMNFDIPEEIKQLQQFQKEDAALTIYEMLQNIFAIFRQDSSSTGWNETIVENLLANVYHQINHLKTVLEEKLEKEDFTRGKLMSSLHLKRYYGRILHYLKAKEYSHCAWTIVHVEILRNFYFINRLTGYLRN

SEQ ID NO: 74 - protein, 166 aa, Homo sapiens
  R147Q
MSYNLLGFLQRSSNFQCQKLLWQLNGRLEYCLKDRMNFDIPEEIKQLQQFQKEDAALTIYEMLQNIFAIFRQDSSSTGWNETIVENLLANVYHQINHLKTVLEEKLEKEDFTRGKLMSSLHLKRYYGRILHYLKAKEYSHCAWTIVQVEILRNFYFINRLTGYLRN

SEQ ID NO: 75 - protein, 166 aa, Homo sapiens
  E149Q
MSYNLLGFLQRSSNFQCQKLLWQLNGRLEYCLKDRMNFDIPEEIKQLQQFQKEDAALTIYEMLQNIFAIFRQDSSSTGWNETIVENLLANVYHQINHLKTVLEEKLEKEDFTRGKLMSSLHLKRYYGRILHYLKAKEYSHCAWTIVRVQILRNFYFINRLTGYLRN

SEQ ID NO: 76 - protein, 166 aa, Homo sapiens
  E149H
MSYNLLGFLQRSSNFQCQKLLWQLNGRLEYCLKDRMNFDIPEEIKQLQQFQKEDAALTIYEMLQNIFAIFRQDSSSTGWNETIVENLLANVYHQINHLKTVLEEKLEKEDFTRGKLMSSLHLKRYYGRILHYLKAKEYSHCAWTIVRVHILRNFYFINRLTGYLRN

SEQ ID NO: 77 - protein, 166 aa, Homo sapiens
  E149N
MSYNLLGFLQRSSNFQCQKLLWQLNGRLEYCLKDRMNFDIPEEIKQLQQFQKEDAALTIYEMLQNIFAIFRQDSSSTGWNETIVENLLANVYHQINHLKTVLEEKLEKEDFTRGKLMSSLHLKRYYGRILHYLKAKEYSHCAWTIVRVNILRNFYFINRLTGYLRN

SEQ ID NO: 78 - protein, 166 aa, Homo sapiens
  L151I
MSYNLLGFLQRSSNFQCQKLLWQLNGRLEYCLKDRMNFDIPEEIKQLQQFQKEDAALTIYEMLQNIFAIFRQDSSSTGWNETIVENLLANVYHQINHLKTVLEEKLEKEDFTRGKLMSSLHLKRYYGRILHYLKAKEYSHCAWTIVRVEIIRNFYFINRLTGYLRN

SEQ ID NO: 79 - protein, 166 aa, Homo sapiens
  L151V
MSYNLLGFLQRSSNFQCQKLLWQLNGRLEYCLKDRMNFDIPEEIKQLQQFQKEDAALTIYEMLQNIFAIFRQDSSSTGWNETIVENLLANVYHQINHLKTVLEEKLEKEDFTRGKLMSSLHLKRYYGRILHYLKAKEYSHCAWTIVRVEIVRNFYFINRLTGYLRN

SEQ ID NO: 80 - protein, 166 aa, Homo sapiens
  F154I
MSYNLLGFLQRSSNFQCQKLLWQLNGRLEYCLKDRMNFDIPEEIKQLQQFQKEDAALTIYEMLQNIFAIFRQDSSSTGWNETIVENLLANVYHQINHLKTVLEEKLEKEDFTRGKLMSSLHLKRYYGRILHYLKAKEYSHCAWTIVRVEILRNIYFINRLTGYLRN

SEQ ID NO: 81 - protein, 166 aa, Homo sapiens
  F154V
MSYNLLGFLQRSSNFQCQKLLWQLNGRLEYCLKDRMNFDIPEEIKQLQQFQKEDAALTIYEMLQNIFAIFRQDSSSTGWNETIVENLLANVYHQINHLKTVLEEKLEKEDFTRGKLMSSLHLKRYYGRILHYLKAKEYSHCAWTIVRVEILRNVYFINRLTGYLRN

SEQ ID NO: 82 - protein, 166 aa, Homo sapiens
  F156I
MSYNLLGFLQRSSNFQCQKLLWQLNGRLEYCLKDRMNFDIPEEIKQLQQFQKEDAALTIYEMLQNIFAIFRQDSSSTGWNETIVENLLANVYHQINHLKTVLEEKLEKEDFTRGKLMSSLHLKRYYGRILHYLKAKEYSHCAWTIVRVEILRNFYIINRLTGYLRN

SEQ ID NO: 83 - protein, 166 aa, Homo sapiens
  F156V
MSYNLLGFLQRSSNFQCQKLLWQLNGRLEYCLKDRMNFDIPEEIKQLQQFQKEDAALTIYEMLQNIFAIFRQDSSSTGWNETIVENLLANVYHQINHLKTVLEEKLEKEDFTRGKLMSSLHLKRYYGRILHYLKAKEYSHCAWTIVRVEILRNFYVINRLTGYLRN

SEQ ID NO: 84 - protein, 166 aa, Homo sapiens
  L160I
MSYNLLGFLQRSSNFQCQKLLWQLNGRLEYCLKDRMNFDIPEEIKQLQQFQKEDAALTIYEMLQNIFAIFRQDSSSTGWNETIVENLLANVYHQINHLKTVLEEKLEKEDFTRGKLMSSLHLKRYYGRILHYLKAKEYSHCAWTIVRVEILRNFYFINRITGYLRN

SEQ ID NO: 85 - protein, 166 aa, Homo sapiens
  L160V
MSYNLLGFLQRSSNFQCQKLLWQLNGRLEYCLKDRMNFDIPEEIKQLQQFQKEDAALTIYEMLQNIFAIFRQDSSSTGWNETIVENLLANVYHQINHLKTVLEEKLEKEDFTRGKLMSSLHLKRYYGRILHYLKAKEYSHCAWTIVRVEILRNFYFINRVTGYLRN

SEQ ID NO: 86 - protein, 166 aa, Homo sapiens
  L164I
MSYNLLGFLQRSSNFQCQKLLWQLNGRLEYCLKDRMNFDIPEEIKQLQQFQKEDAALTIYEMLQNIFAIFRQDSSSTGWNETIVENLLANVYHQINHLKTVLEEKLEKEDFTRGKLMSSLHLKRYYGRILHYLKAKEYSHCAWTIVRVEILRNFYFINRLTGYIRN

SEQ ID NO: 87 - protein, 166 aa, Homo sapiens
  L164V
MSYNLLGFLQRSSNFQCQKLLWQLNGRLEYCLKDRMNFDIPEEIKQLQQFQKEDAALTIYEMLQNIFAIFRQDSSSTGWNETIVENLLANVYHQINHLKTVLEEKLEKEDFTRGKLMSSLHLKRYYGRILHYLKAKEYSHCAWTIVRVEILRNFYFINRLTGYVRN

SEQ ID NO: 88 - protein, 166 aa, Homo sapiens
MSYNDEGFLQRSSNFQCQKLLWQLNGRLEYCLKDRMNFDIPEEIKQLQQFQKEDAALTIYEMLQNIFAIFRQDSSSTGWNETIVENLLANVYHQINHLKTVLEEKLEKEDFTRGKLMSSLHLKRYYGRILHYLKAKEYSHCAWTIVRVEILRNFYFINRLTGYLRN

SEQ ID NO: 89 - protein, 166 aa, Homo sapiens
MSYNELGFLDRSSNFQCQKLLWQLNGRLEYCLKDRMNFDIPEEIKQLQQFQKEDAALTIYEMLQNIFAIFRQDSSSTGWNETIVENLLANVYHQINHLKTVLEEKLEKEDFTRGKLMSSLHLKRYYGRILHYLKAKEYSHCAWTIVRVEILRNFYFINRLTGYLRN

SEQ ID NO: 90 - protein, 166 aa, Homo sapiens
MSYNQLGFLQRSSNFQCQKLLWQLNGRLEYCLKDRINFDIPEEIKQLQQFQKEDAALTIYEMLQNIFAIFRQDSSSTGWNETIVENLLANVYHQINHLKTVLEEKLEKEDFTRGKLMSSLHLKRYYGRILHYLKAKEYSHCAWTIVRVEILRNFYFINRLTGYLRN

SEQ ID NO: 91 - protein, 166 aa, Homo sapiens
MSYNLEGFLQRSSNFQCQKLLWQLNGRLEYCLKDRMNFDIPEEIKQIQQFQKEDAALTIYEMLQNIFAIFRQDSSSTGWNETIVENLLANVYHQINHLKTVLEEKLEKEDFTRGKLMSSLHLKRYYGRILHYLKAKEYSHCAWTIVRVEILRNFYFINRLTGYLRN

SEQ ID NO: 92 - protein, 166 aa, Homo sapiens
MSYNELGFLQRSSNFQCQKLLWQLNGRLEYCLKDRMNFDIPEEIKQLQQFQKEDAALTIYEMLQNIFAIFRQDSSSTGWNETIVENLLANVYHQINHLKTVLEEKLESEDFTRGKLMSSLHLKRYYGRILHYLKAKEYSHCAWTIVRVEILRNFYFINRLTGYLRN

SEQ ID NO: 93 - protein, 166 aa, Homo sapiens
MSYNEEGFLQRSSNFQCQKLLWQLNGRLEYCLKDRMNFDIPEEIKQLQQFQKEDAALTIYEMLQNIFAIFRQDSSSTGWNETIVENLLANVYHQINHLKTVLEEKLEKEDFTRGKLMSSLHLKRYYGRILHYLKAKEYSHCAWTIVRVEILRNFYFINRLTGYLRN

SEQ ID NO: 94 - protein, 166 aa, Homo sapiens
MSYNDLGFLDRSSNFQCQKLLWQLNGRLEYCLKDRMNFDIPEEIKQLQQFQKEDAALTIYEMLQNIFAIFRQDSSSTGWNETIVENLLANVYHQINHLKTVLEEKLEKEDFTRGKLMSSLHLKRYYGRILHYLKAKEYSHCAWTIVRVEILRNFYFINRLTGYLRN

SEQ ID NO: 95 - protein, 166 aa, Homo sapiens
MSYNNLGFLQRSSNFQCQKLLWQLNGRLEYCLKDRINFDIPEEIKQLQQFQKEDAALTIYEMLQNIFAIFRQDSSSTGWNETIVENLLANVYHQINHLKTVLEEKLEKEDFTRGKLMSSLHLKRYYGRILHYLKAKEYSHCAWTIVRVEILRNFYFINRLTGYLRN

SEQ ID NO: 96 - protein, 166 aa, Homo sapiens
MSYNLQGFLQRSSNFQCQKLLWQLNGRLEYCLKDRMNFDIPEEIKQIQQFQKEDAALTIYEMLQNIFAIFRQDSSSTGWNETIVENLLANVYHQINHLKTVLEEKLEKEDFTRGKLMSSLHLKRYYGRILHYLKAKEYSHCAWTIVRVEILRNFYFINRLTGYLRN

SEQ ID NO: 97 - protein, 166 aa, Homo sapiens
MSYNDLGFLQRSSNFQCQKLLWQLNGRLEYCLKDRMNFDIPEEIKQLQQFQKEDAALTIYEMLQNIFAIFRQDSSSTGWNETIVENLLANVYHQINHLKTVLEEKLESEDFTRGKLMSSLHLKRYYGRILHYLKAKEYSHCAWTIVRVEILRNFYFINRLTGYLRN

SEQ ID NO: 98 - protein, 166 aa, Homo sapiens
MSYNNEGFLQRSSNFQCQKLLWQLNGRLEYCLKDRMNFDIPEEIKQLQQFQKEDAALTIYEMLQNIFAIFRQDSSSTGWNETIVENLLANVYHQINHLKTVLEEKLEKEDFTRGKLMSSLHLKRYYGRILHYLKAKEYSHCAWTIVRVEILRNFYFINRLTGYLRN

SEQ ID NO: 99 - protein, 166 aa, Homo sapiens
MSYNQLGFLDRSSNFQCQKLLWQLNGRLEYCLKDRMNFDIPEEIKQLQQFQKEDAALTIYEMLQNIFAIFRQDSSSTGWNETIVENLLANVYHQINHLKTVLEEKLEKEDFTRGKLMSSLHLKRYYGRILHYLKAKEYSHCAWTIVRVEILRNFYFINRLTGYLRN

SEQ ID NO: 100 - protein, 166 aa, Homo sapiens
MSYNLEGFLQRSSNFQCQKLLWQLNGRLEYCLKDRINFDIPEEIKQLQQFQKEDAALTIYEMLQNIFAIFRQDSSSTGWNETIVENLLANVYHQINHLKTVLEEKLEKEDFTRGKLMSSLHLKRYYGRILHYLKAKEYSHCAWTIVRVEILRNFYFINRLTGYLRN

SEQ ID NO: 101 - protein, 166 aa, Homo sapiens
MSYNELGFLQRSSNFQCQKLLWQLNGRLEYCLKDRMNFDIPEEIKQLQQFQKEDAALTIYEMLQNIFAIFRQDSSSTGWNETIVEQLLANVYHQINHLKTVLEEKLEKEDFTRGKLMSSLHLKRYYGRILHYLKAKEYSHCAWTIVRVEILRNFYFINRLTGYLRN

SEQ ID NO: 102 - protein, 166 aa, Homo sapiens
MSYNQLGFLQRSSNFQCQKLLWQLNGRLEYCLKDRMNFDIPEEIKQLQQFQKEDAALTIYEMLQNIFAIFRQDSSSTGWNETIVENLLANVYHQINHLKTVLEEKLESEDFTRGKLMSSLHLKRYYGRILHYLKAKEYSHCAWTIVRVEILRNFYFINRLTGYLRN

SEQ ID NO: 103 - protein, 166 aa, Homo sapiens
MSYNQEGFLQRSSNFQCQKLLWQLNGRLEYCLKDRMNFDIPEEIKQLQQFQKEDAALTIYEMLQNIFAIFRQDSSSTGWNETIVENLLANVYHQINHLKTVLEEKLEKEDFTRGKLMSSLHLKRYYGRILHYLKAKEYSHCAWTIVRVEILRNFYFINRLTGYLRN

SEQ ID NO: 104 - protein, 166 aa, Homo sapiens
MSYNNLGFLDRSSNFQCQKLLWQLNGRLEYCLKDRMNFDIPEEIKQLQQFQKEDAALTIYEMLQNIFAIFRQDSSSTGWNETIVENLLANVYHQINHLKTVLEEKLEKEDFTRGKLMSSLHLKRYYGRILHYLKAKEYSHCAWTIVRVEILRNFYFINRLTGYLRN

SEQ ID NO: 105 - protein, 166 aa, Homo sapiens
MSYNLQGFLQRSSNFQCQKLLWQLNGRLEYCLKDRINFDIPEEIKQLQQFQKEDAALTIYEMLQNIFAIFRQDSSSTGWNETIVENLLANVYHQINHLKTVLEEKLEKEDFTRGKLMSSLHLKRYYGRILHYLKAKEYSHCAWTIVRVEILRNFYFINRLTGYLRN

SEQ ID NO: 106 - protein, 166 aa, Homo sapiens
MSYNDLGFLQRSSNFQCQKLLWQLNGRLEYCLKDRMNFDIPEEIKQLQQFQKEDAALTIYEMLQNIFAIFRQDSSSTGWNETIVEQLLANVYHQINHLKTVLEEKLEKEDFTRGKLMSSLHLKRYYGRILHYLKAKEYSHCAWTIVRVEILRNFYFINRLTGYLRN

SEQ ID NO: 107 - protein, 166 aa, Homo sapiens
MSYNNLGFLQRSSNFQCQKLLWQLNGRLEYCLKDRMNFDIPEEIKQLQQFQKEDAALTIYEMLQNIFAIFRQDSSSTGWNETIVENLLANVYHQINHLKTVLEEKLESEDFTRGKLMSSLHLKRYYGRILHYLKAKEYSHCAWTIVRVEILRNFYFINRLTGYLRN

SEQ ID NO: 108 - protein, 166 aa, Homo sapiens
MSYNDQGFLQRSSNFQCQKLLWQLNGRLEYCLKDRMNFDIPEEIKQLQQFQKEDAALTIYEMLQNIFAIFRQDSSSTGWNETIVENLLANVYHQINHLKTVLEEKLEKEDFTRGKLMSSLHLKRYYGRILHYLKAKEYSHCAWTIVRVEILRNFYFINRLTGYLRN

SEQ ID NO: 109 - protein, 166 aa, Homo sapiens
MSYNLEGFLDRSSNFQCQKLLWQLNGRLEYCLKDRMNFDIPEEIKQLQQFQKEDAALTIYEMLQNIFAIFRQDSSSTGWNETIVENLLANVYHQINHLKTVLEEKLEKEDFTRGKLMSSLHLKRYYGRILHYLKAKEYSHCAWTIVRVEILRNFYFINRLTGYLRN

SEQ ID NO: 110 - protein, 166 aa, Homo sapiens
MSYNELGFLQRSSNFQCQKLLWQLNGRLEYCLKDRMNFDIPEEIKQIQQFQKEDAALTIYEMLQNIFAIFRQDSSSTGWNETIVENLLANVYHQINHLKTVLEEKLEKEDFTRGKLMSSLHLKRYYGRILHYLKAKEYSHCAWTIVRVEILRNFYFINRLTGYLRN

SEQ ID NO: 111 - protein, 166 aa, Homo sapiens
MSYNQLGFLQRSSNFQCQKLLWQLNGRLEYCLKDRMNFDIPEEIKQLQQFQKEDAALTIYEMLQNIFAIFRQDSSSTGWNETIVEQLLANVYHQINHLKTVLEEKLEKEDFTRGKLMSSLHLKRYYGRILHYLKAKEYSHCAWTIVRVEILRNFYFINRLTGYLRN

SEQ ID NO: 112 - protein, 166 aa, Homo sapiens
MSYNLEGFLQRSSNFQCQKLLWQLNGRLEYCLKDRMNFDIPEEIKQLQQFQKEDAALTIYEMLQNIFAIFRQDSSSTGWNETIVENLLANVYHQINHLKTVLEEKLESEDFTRGKLMSSLHLKRYYGRILHYLKAKEYSHCAWTIVRVEILRNFYFINRLTGYLRN

SEQ ID NO: 113 - protein, 166 aa, Homo sapiens
MSYNEQGFLQRSSNFQCQKLLWQLNGRLEYCLKDRMNFDIPEEIKQLQQFQKEDAALTIYEMLQNIFAIFRQDSSSTGWNETIVENLLANVYHQINHLKTVLEEKLEKEDFTRGKLMSSLHLKRYYGRILHYLKAKEYSHCAWTIVRVEILRNFYFINRLTGYLRN

SEQ ID NO: 114 - protein, 166 aa, Homo sapiens
MSYNLQGFLDRSSNFQCQKLLWQLNGRLEYCLKDRMNFDIPEEIKQLQQFQKEDAALTIYEMLQNIFAIFRQDSSSTGWNETIVENLLANVYHQINHLKTVLEEKLEKEDFTRGKLMSSLHLKRYYGRILHYLKAKEYSHCAWTIVRVEILRNFYFINRLTGYLRN

SEQ ID NO: 115 - protein, 166 aa, Homo sapiens
MSYNDLGFLQRSSNFQCQKLLWQLNGRLEYCLKDRMNFDIPEEIKQIQQFQKEDAALTIYEMLQNIFAIFRQDSSSTGWNETIVENLLANVYHQINHLKTVLEEKLEKEDFTRGKLMSSLHLKRYYGRILHYLKAKEYSHCAWTIVRVEILRNFYFINRLTGYLRN

SEQ ID NO: 116 - protein, 166 aa, Homo sapiens
MSYNNLGFLQRSSNFQCQKLLWQLNGRLEYCLKDRMNFDIPEEIKQLQQFQKEDAALTIYEMLQNIFAIFRQDSSSTGWNETIVEQLLANVYHQINHLKTVLEEKLEKEDFTRGKLMSSLHLKRYYGRILHYLKAKEYSHCAWTIVRVEILRNFYFINRLTGYLRN

SEQ ID NO: 117 - protein, 166 aa, Homo sapiens
MSYNLQGFLQRSSNFQCQKLLWQLNGRLEYCLKDRMNFDIPEEIKQLQQFQKEDAALTIYEMLQNIFAIFRQDSSSTGWNETIVENLLANVYHQINHLKTVLEEKLESEDFTRGKLMSSLHLKRYYGRILHYLKAKEYSHCAWTIVRVEILRNFYFINRLTGYLRN

SEQ ID NO: 118 - protein, 166 aa, Homo sapiens
MSYNNQGFLQRSSNFQCQKLLWQLNGRLEYCLKDRMNFDIPEEIKQLQQFQKEDAALTIYEMLQNIFAIFRQDSSSTGWNETIVENLLANVYHQINHLKTVLEEKLEKEDFTRGKLMSSLHLKRYYGRILHYLKAKEYSHCAWTIVRVEILRNFYFINRLTGYLRN

SEQ ID NO: 119 - protein, 166 aa, Homo sapiens
MSYNELGFLQRSSNFQCQKLLWQLNGRLEYCLKDRINFDIPEEIKQLQQFQKEDAALTIYEMLQNIFAIFRQDSSSTGWNETIVENLLANVYHQINHLKTVLEEKLEKEDFTRGKLMSSLHLKRYYGRILHYLKAKEYSHCAWTIVRVEILRNFYFINRLTGYLRN

SEQ ID NO: 120 - protein, 166 aa, Homo sapiens
MSYNQLGFLQRSSNFQCQKLLWQLNGRLEYCLKDRMNFDIPEEIKQIQQFQKEDAALTIYEMLQNIFAIFRQDSSSTGWNETIVENLLANVYHQINHLKTVLEEKLEKEDFTRGKLMSSLHLKRYYGRILHYLKAKEYSHCAWTIVRVEILRNFYFINRLTGYLRN

SEQ ID NO: 121 - protein, 166 aa, Homo sapiens
MSYNLEGFLQRSSNFQCQKLLWQLNGRLEYCLKDRMNFDIPEEIKQLQQFQKEDAALTIYEMLQNIFAIFRQDSSSTGWNETIVEQLLANVYHQINHLKTVLEEKLEKEDFTRGKLMSSLHLKRYYGRILHYLKAKEYSHCAWTIVRVEILRNFYFINRLTGYLRN

SEQ ID NO: 122 - protein, 166 aa, Homo sapiens
MSYNQQGFLQRSSNFQCQKLLWQLNGRLEYCLKDRMNFDIPEEIKQLQQFQKEDAALTIYEMLQNIFAIFRQDSSSTGWNETIVENLLANVYHQINHLKTVLEEKLEKEDFTRGKLMSSLHLKRYYGRILHYLKAKEYSHCAWTIVRVEILRNFYFINRLTGYLRN

SEQ ID NO: 123 - protein, 166 aa, Homo sapiens
MSYNDLGFLQRSSNFQCQKLLWQLNGRLEYCLKDRINFDIPEEIKQLQQFQKEDAALTIYEMLQNIFAIFRQDSSSTGWNETIVENLLANVYHQINHLKTVLEEKLEKEDFTRGKLMSSLHLKRYYGRILHYLKAKEYSHCAWTIVRVEILRNFYFINRLTGYLRN

SEQ ID NO: 124 - protein, 166 aa, Homo sapiens
MSYNNLGFLQRSSNFQCQKLLWQLNGRLEYCLKDRMNFDIPEEIKQIQQFQKEDAALTIYEMLQNIFAIFRQDSSSTGWNETIVENLLANVYHQINHLKTVLEEKLEKEDFTRGKLMSSLHLKRYYGRILHYLKAKEYSHCAWTIVRVEILRNFYFINRLTGYLRN

SEQ ID NO: 125 - protein, 166 aa, Homo sapiens
MSYNLQGFLQRSSNFQCQKLLWQLNGRLEYCLKDRMNFDIPEEIKQLQQFQKEDAALTIYEMLQNIFAIFRQDSSSTGWNETIVEQLLANVYHQINHLKTVLEEKLEKEDFTRGKLMSSLHLKRYYGRILHYLKAKEYSHCAWTIVRVEILRNFYFINRLTGYLRN

SEQ ID NO: 126 - protein, 166 aa, Homo sapiens
  M1C/ V101C
CSYNLLGFLQRSSNFQCQKLLWQLNGRLEYCLKDRMNFDIPEEIKQLQQFQKEDAALTIYEMLQNIFAIFRQDSSSTGWNETIVENLLANVYHQINHLKTCLEEKLEKEDFTRGKLMSSLHLKRYYGRILHYLKAKEYSHCAWTIVRVEILRNFYFINRLTGYLRN

SEQ ID NO: 127 - protein, 166 aa, Homo sapiens
  Q16C/ N90C
MSYNLLGFLQRSSNFCCQKLLWQLNGRLEYCLKDRMNFDIPEEIKQLQQFQKEDAALTIYEMLQNIFAIFRQDSSSTGWNETIVENLLACVYHQINHLKTVLEEKLEKEDFTRGKLMSSLHLKRYYGRILHYLKAKEYSHCAWTIVRVEILRNFYFINRLTGYLRN

SEQ ID NO: 128 - protein, 166 aa, Homo sapiens
  L6C/ L98C
MSYNLCGFLQRSSNFQCQKLLWQLNGRLEYCLKDRMNFDIPEEIKQLQQFQKEDAALTIYEMLQNIFAIFRQDSSSTGWNETIVENLLANVYHQINHCKTVLEEKLEKEDFTRGKLMSSLHLKRYYGRILHYLKAKEYSHCAWTIVRVEILRNFYFINRLTGYLRN

SEQ ID NO: 129 - protein, 166 aa, Homo sapiens
  N90C
MSYNLLGFLQRSSNFQCQKLLWQLNGRLEYCLKDRMNFDIPEEIKQLQQFQKEDAALTIYEMLQNIFAIFRQDSSSTGWNETIVENLLACVYHQINHLKTVLEEKLEKEDFTRGKLMSSLHLKRYYGRILHYLKAKEYSHCAWTIVRVEILRNFYFINRLTGYLRN

SEQ ID NO: 130 - protein, 166 aa, Homo sapiens
  Q10C/ H97C
MSYNLLGFLCRSSNFQCQKLLWQLNGRLEYCLKDRMNFDIPEEIKQLQQFQKEDAALTIYEMLQNIFAIFRQDSSSTGWNETIVENLLANVYHQINCLKTVLEEKLEKEDFTRGKLMSSLHLKRYYGRILHYLKAKEYSHCAWTIVRVEILRNFYFINRLTGYLRN

SEQ ID NO: 131 - protein, 166 aa, Homo sapiens
  V91C
MSYNLLGFLQRSSNFQCQKLLWQLNGRLEYCLKDRMNFDIPEEIKQLQQFQKEDAALTIYEMLQNIFAIFRQDSSSTGWNETIVENLLANCYHQINHLKTVLEEKLEKEDFTRGKLMSSLHLKRYYGRILHYLKAKEYSHCAWTIVRVEILRNFYFINRLTGYLRN

SEQ ID NO: 132 - protein, 166 aa, Homo sapiens
  Q10C/ L98C
MSYNLLGFLCRSSNFQCQKLLWQLNGRLEYCLKDRMNFDIPEEIKQLQQFQKEDAALTIYEMLQNIFAIFRQDSSSTGWNETIVENLLANVYHQINHCKTVLEEKLEKEDFTRGKLMSSLHLKRYYGRILHYLKAKEYSHCAWTIVRVEILRNFYFINRLTGYLRN

SEQ ID NO: 133 - protein, 166 aa, Homo sapiens
  S13C/ Q94C
MSYNLLGFLQRSCNFQCQKLLWQLNGRLEYCLKDRMNFDIPEEIKQLQQFQKEDAALTIYEMLQNIFAIFRQDSSSTGWNETIVENLLANVYHCINHLKTVLEEKLEKEDFTRGKLMSSLHLKRYYGRILHYLKAKEYSHCAWTIVRVEILRNFYFINRLTGYLRN

SEQ ID NO: 134 - protein, 166 aa, Homo sapiens
  E43K
MSYNLLGFLQRSSNFQCQKLLWQLNGRLEYCLKDRMNFDIPEKIKQLQQFQKEDAALTIYEMLQNIFAIFRQDSSSTGWNETIVENLLANVYHQINHLKTVLEEKLEKEDFTRGKLMSSLHLKRYYGRILHYLKAKEYSHCAWTIVRVEILRNFYFINRLTGYLRN

SEQ ID NO: 135 - protein, 166 aa, Homo sapiens
  E53R
MSYNLLGFLQRSSNFQCQKLLWQLNGRLEYCLKDRMNFDIPEEIKQLQQFQKRDAALTIYEMLQNIFAIFRQDSSSTGWNETIVENLLANVYHQINHLKTVLEEKLEKEDFTRGKLMSSLHLKRYYGRILHYLKAKEYSHCAWTIVRVEILRNFYFINRLTGYLRN

SEQ ID NO: 136 - protein, 166 aa, Homo sapiens
  D54K
MSYNLLGFLQRSSNFQCQKLLWQLNGRLEYCLKDRMNFDIPEEIKQLQQFQKEKAALTIYEMLQNIFAIFRQDSSSTGWNETIVENLLANVYHQINHLKTVLEEKLEKEDFTRGKLMSSLHLKRYYGRILHYLKAKEYSHCAWTIVRVEILRNFYFINRLTGYLRN

SEQ ID NO: 137 - protein, 166 aa, Homo sapiens
  E61K
MSYNLLGFLQRSSNFQCQKLLWQLNGRLEYCLKDRMNFDIPEEIKQLQQFQKEDAALTIYKMLQNIFAIFRQDSSSTGWNETIVENLLANVYHQINHLKTVLEEKLEKEDFTRGKLMSSLHLKRYYGRILHYLKAKEYSHCAWTIVRVEILRNFYFINRLTGYLRN

SEQ ID NO: 138 - protein, 166 aa, Homo sapiens
  E81K
MSYNLLGFLQRSSNFQCQKLLWQLNGRLEYCLKDRMNFDIPEEIKQLQQFQKEDAALTIYEMLQNIFAIFRQDSSSTGWNKTIVENLLANVYHQINHLKTVLEEKLEKEDFTRGKLMSSLHLKRYYGRILHYLKAKEYSHCAWTIVRVEILRNFYFINRLTGYLRN

SEQ ID NO: 139 - protein, 166 aa, Homo sapiens
  E85K
MSYNLLGFLQRSSNFQCQKLLWQLNGRLEYCLKDRMNFDIPEEIKQLQQFQKEDAALTIYEMLQNIFAIFRQDSSSTGWNETIVKNLLANVYHQINHLKTVLEEKLEKEDFTRGKLMSSLHLKRYYGRILHYLKAKEYSHCAWTIVRVEILRNFYFINRLTGYLRN

SEQ ID NO: 140 - protein, 166 aa, Homo sapiens
  E103K
MSYNLLGFLQRSSNFQCQKLLWQLNGRLEYCLKDRMNFDIPEEIKQLQQFQKEDAALTIYEMLQNIFAIFRQDSSSTGWNETIVENLLANVYHQINHLKTVLKEKLEKEDFTRGKLMSSLHLKRYYGRILHYLKAKEYSHCAWTIVRVEILRNFYFINRLTGYLRN

SEQ ID NO: 141 - protein, 166 aa, Homo sapiens
  E104R
MSYNLLGFLQRSSNFQCQKLLWQLNGRLEYCLKDRMNFDIPEEIKQLQQFQKEDAALTIYEMLQNIFAIFRQDSSSTGWNETIVENLLANVYHQINHLKTVLERKLEKEDFTRGKLMSSLHLKRYYGRILHYLKAKEYSHCAWTIVRVEILRNFYFINRLTGYLRN

SEQ ID NO: 142 - protein, 166 aa, Homo sapiens
  E107R
MSYNLLGFLQRSSNFQCQKLLWQLNGRLEYCLKDRMNFDIPEEIKQLQQFQKEDAALTIYEMLQNIFAIFRQDSSSTGWNETIVENLLANVYHQINHLKTVLEEKLRKEDFTRGKLMSSLHLKRYYGRILHYLKAKEYSHCAWTIVRVEILRNFYFINRLTGYLRN

SEQ ID NO: 143 - protein, 166 aa, Homo sapiens
  E109R
MSYNLLGFLQRSSNFQCQKLLWQLNGRLEYCLKDRMNFDIPEEIKQLQQFQKEDAALTIYEMLQNIFAIFRQDSSSTGWNETIVENLLANVYHQINHLKTVLEEKLEKRDFTRGKLMSSLHLKRYYGRILHYLKAKEYSHCAWTIVRVEILRNFYFINRLTGYLRN

SEQ ID NO: 144 - protein, 166 aa, Homo sapiens
  D110K
MSYNLLGFLQRSSNFQCQKLLWQLNGRLEYCLKDRMNFDIPEEIKQLQQFQKEDAALTIYEMLQNIFAIFRQDSSSTGWNETIVENLLANVYHQINHLKTVLEEKLEKEKFTRGKLMSSLHLKRYYGRILHYLKAKEYSHCAWTIVRVEILRNFYFINRLTGYLRN

SEQ ID NO: 145 - protein, 166 aa, Homo sapiens
  R11D
MSYNLLGFLQDSSNFQCQKLLWQLNGRLEYCLKDRMNFDIPEEIKQLQQFQKEDAALTIYEMLQNIFAIFRQDSSSTGWNETIVENLLANVYHQINHLKTVLEEKLEKEDFTRGKLMSSLHLKRYYGRILHYLKAKEYSHCAWTIVRVEILRNFYFINRLTGYLRN

SEQ ID NO: 146 - protein, 166 aa, Homo sapiens
  K45D
MSYNLLGFLQRSSNFQCQKLLWQLNGRLEYCLKDRMNFDIPEEIDQLQQFQKEDAALTIYEMLQNIFAIFRQDSSSTGWNETIVENLLANVYHQINHLKTVLEEKLEKEDFTRGKLMSSLHLKRYYGRILHYLKAKEYSHCAWTIVRVEILRNFYFINRLTGYLRN

SEQ ID NO: 147 - protein, 166 aa, Homo sapiens
  K52D
MSYNLLGFLQRSSNFQCQKLLWQLNGRLEYCLKDRMNFDIPEEIKQLQQFQDEDAALTIYEMLQNIFAIFRQDSSSTGWNETIVENLLANVYHQINHLKTVLEEKLEKEDFTRGKLMSSLHLKRYYGRILHYLKAKEYSHCAWTIVRVEILRNFYFINRLTGYLRN

SEQ ID NO: 148 - protein, 166 aa, Homo sapiens
  K105D
MSYNLLGFLQRSSNFQCQKLLWQLNGRLEYCLKDRMNFDIPEEIKQLQQFQKEDAALTIYEMLQNIFAIFRQDSSSTGWNETIVENLLANVYHQINHLKTVLEEDLEKEDFTRGKLMSSLHLKRYYGRILHYLKAKEYSHCAWTIVRVEILRNFYFINRLTGYLRN

SEQ ID NO: 149 - protein, 166 aa, Homo sapiens
  K108D
MSYNLLGFLQRSSNFQCQKLLWQLNGRLEYCLKDRMNFDIPEEIKQLQQFQKEDAALTIYEMLQNIFAIFRQDSSSTGWNETIVENLLANVYHQINHLKTVLEEKLEDEDFTRGKLMSSLHLKRYYGRILHYLKAKEYSHCAWTIVRVEILRNFYFINRLTGYLRN

SEQ ID NO: 150 - protein, 166 aa, Homo sapiens
  R113E
MSYNLLGFLQRSSNFQCQKLLWQLNGRLEYCLKDRMNFDIPEEIKQLQQFQKEDAALTIYEMLQNIFAIFRQDSSSTGWNETIVENLLANVYHQINHLKTVLEEKLEKEDFTEGKLMSSLHLKRYYGRILHYLKAKEYSHCAWTIVRVEILRNFYFINRLTGYLRN

SEQ ID NO: 151 - protein, 166 aa, Homo sapiens
  K115D
MSYNLLGFLQRSSNFQCQKLLWQLNGRLEYCLKDRMNFDIPEEIKQLQQFQKEDAALTIYEMLQNIFAIFRQDSSSTGWNETIVENLLANVYHQINHLKTVLEEKLEKEDFTRGDLMSSLHLKRYYGRILHYLKAKEYSHCAWTIVRVEILRNFYFINRLTGYLRN

SEQ ID NO: 152 - protein, 166 aa, Homo sapiens
  R152D
MSYNLLGFLQRSSNFQCQKLLWQLNGRLEYCLKDRMNFDIPEEIKQLQQFQKEDAALTIYEMLQNIFAIFRQDSSSTGWNETIVENLLANVYHQINHLKTVLEEKLEKEDFTRGKLMSSLHLKRYYGRILHYLKAKEYSHCAWTIVRVEILDNFYFINRLTGYLRN

SEQ ID NO: 153 - protein, 166 aa, Homo sapiens
  R165D
MSYNLLGFLQRSSNFQCQKLLWQLNGRLEYCLKDRMNFDIPEEIKQLQQFQKEDAALTIYEMLQNIFAIFRQDSSSTGWNETIVENLLANVYHQINHLKTVLEEKLEKEDFTRGKLMSSLHLKRYYGRILHYLKAKEYSHCAWTIVRVEILRNFYFINRLTGYLDN

SEQ ID NO: 154 - protein, 166 aa, Homo sapiens
  D39Q
MSYNLLGFLQRSSNFQCQKLLWQLNGRLEYCLKDRMNFQIPEEIKQLQQFQKEDAALTIYEMLQNIFAIFRQDSSSTGWNETIVENLLANVYHQINHLKTVLEEKLEKEDFTRGKLMSSLHLKRYYGRILHYLKAKEYSHCAWTIVRVEILRNFYFINRLTGYLRN

SEQ ID NO: 155 - protein, 166 aa, Homo sapiens
  D39H
MSYNLLGFLQRSSNFQCQKLLWQLNGRLEYCLKDRMNFHIPEEIKQLQQFQKEDAALTIYEMLQNIFAIFRQDSSSTGWNETIVENLLANVYHQINHLKTVLEEKLEKEDFTRGKLMSSLHLKRYYGRILHYLKAKEYSHCAWTIVRVEILRNFYFINRLTGYLRN

SEQ ID NO: 156 - protein, 166 aa, Homo sapiens
  D39G
MSYNLLGFLQRSSNFQCQKLLWQLNGRLEYCLKDRMNFGIPEEIKQLQQFQKEDAALTIYEMLQNIFAIFRQDSSSTGWNETIVENLLANVYHQINHLKTVLEEKLEKEDFTRGKLMSSLHLKRYYGRILHYLKAKEYSHCAWTIVRVEILRNFYFINRLTGYLRN

SEQ ID NO: 157 - protein, 166 aa, Homo sapiens
  E42Q
MSYNLLGFLQRSSNFQCQKLLWQLNGRLEYCLKDRMNFDIPQEIKQLQQFQKEDAALTIYEMLQNIFAIFRQDSSSTGWNETIVENLLANVYHQINHLKTVLEEKLEKEDFTRGKLMSSLHLKRYYGRILHYLKAKEYSHCAWTIVRVEILRNFYFINRLTGYLRN

SEQ ID NO: 158 - protein, 166 aa, Homo sapiens
  E42H
MSYNLLGFLQRSSNFQCQKLLWQLNGRLEYCLKDRMNFDIPHEIKQLQQFQKEDAALTIYEMLQNIFAIFRQDSSSTGWNETIVENLLANVYHQINHLKTVLEEKLEKEDFTRGKLMSSLHLKRYYGRILHYLKAKEYSHCAWTIVRVEILRNFYFINRLTGYLRN

SEQ ID NO: 159 - protein, 166 aa, Homo sapiens
  K45Q
MSYNLLGFLQRSSNFQCQKLLWQLNGRLEYCLKDRMNFDIPEEIQQLQQFQKEDAALTIYEMLQNIFAIFRQDSSSTGWNETIVENLLANVYHQINHLKTVLEEKLEKEDFTRGKLMSSLHLKRYYGRILHYLKAKEYSHCAWTIVRVEILRNFYFINRLTGYLRN

SEQ ID NO: 160 - protein, 166 aa, Homo sapiens
  K45T
MSYNLLGFLQRSSNFQCQKLLWQLNGRLEYCLKDRMNFDIPEEITQLQQFQKEDAALTIYEMLQNIFAIFRQDSSSTGWNETIVENLLANVYHQINHLKTVLEEKLEKEDFTRGKLMSSLHLKRYYGRILHYLKAKEYSHCAWTIVRVEILRNFYFINRLTGYLRN

SEQ ID NO: 161 - protein, 166 aa, Homo sapiens
  K45S
MSYNLLGFLQRSSNFQCQKLLWQLNGRLEYCLKDRMNFDIPEEISQLQQFQKEDAALTIYEMLQNIFAIFRQDSSSTGWNETIVENLLANVYHQINHLKTVLEEKLEKEDFTRGKLMSSLHLKRYYGRILHYLKAKEYSHCAWTIVRVEILRNFYFINRLTGYLRN

SEQ ID NO: 162 - protein, 166 aa, Homo sapiens
  K45H
MSYNLLGFLQRSSNFQCQKLLWQLNGRLEYCLKDRMNFDIPEEIHQLQQFQKEDAALTIYEMLQNIFAIFRQDSSSTGWNETIVENLLANVYHQINHLKTVLEEKLEKEDFTRGKLMSSLHLKRYYGRILHYLKAKEYSHCAWTIVRVEILRNFYFINRLTGYLRN

SEQ ID NO: 163 - protein, 166 aa, Homo sapiens
  K47V
MSYNLLGFLQRSSNFQCQKLLWQLNGRLEYCLKDRMNFDIPEEIKQVQQFQKEDAALTIYEMLQNIFAIFRQDSSSTGWNETIVENLLANVYHQINHLKTVLEEKLEKEDFTRGKLMSSLHLKRYYGRILHYLKAKEYSHCAWTIVRVEILRNFYFINRLTGYLRN

SEQ ID NO: 164 - protein, 166 aa, Homo sapiens
  K47I
MSYNLLGFLQRSSNFQCQKLLWQLNGRLEYCLKDRMNFDIPEEIKQIQQFQKEDAALTIYEMLQNIFAIFRQDSSSTGWNETIVENLLANVYHQINHLKTVLEEKLEKEDFTRGKLMSSLHLKRYYGRILHYLKAKEYSHCAWTIVRVEILRNFYFINRLTGYLRN

SEQ ID NO: 165 - protein, 166 aa, Homo sapiens
  K47T
MSYNLLGFLQRSSNFQCQKLLWQLNGRLEYCLKDRMNFDIPEEIKQTQQFQKEDAALTIYEMLQNIFAIFRQDSSSTGWNETIVENLLANVYHQINHLKTVLEEKLEKEDFTRGKLMSSLHLKRYYGRILHYLKAKEYSHCAWTIVRVEILRNFYFINRLTGYLRN

SEQ ID NO: 166 - protein, 166 aa, Homo sapiens
  K47Q
MSYNLLGFLQRSSNFQCQKLLWQLNGRLEYCLKDRMNFDIPEEIKQQQQFQKEDAALTIYEMLQNIFAIFRQDSSSTGWNETIVENLLANVYHQINHLKTVLEEKLEKEDFTRGKLMSSLHLKRYYGRILHYLKAKEYSHCAWTIVRVEILRNFYFINRLTGYLRN

SEQ ID NO: 167 - protein, 166 aa, Homo sapiens
  K47H
MSYNLLGFLQRSSNFQCQKLLWQLNGRLEYCLKDRMNFDIPEEIKQHQQFQKEDAALTIYEMLQNIFAIFRQDSSSTGWNETIVENLLANVYHQINHLKTVLEEKLEKEDFTRGKLMSSLHLKRYYGRILHYLKAKEYSHCAWTIVRVEILRNFYFINRLTGYLRN

SEQ ID NO: 168 - protein, 166 aa, Homo sapiens
  K47A
MSYNLLGFLQRSSNFQCQKLLWQLNGRLEYCLKDRMNFDIPEEIKQAQQFQKEDAALTIYEMLQNIFAIFRQDSSSTGWNETIVENLLANVYHQINHLKTVLEEKLEKEDFTRGKLMSSLHLKRYYGRILHYLKAKEYSHCAWTIVRVEILRNFYFINRLTGYLRN

SEQ ID NO: 169 - protein, 166 aa, Homo sapiens
  K52Q
MSYNLLGFLQRSSNFQCQKLLWQLNGRLEYCLKDRMNFDIPEEIKQLQQFQQEDAALTIYEMLQNIFAIFRQDSSSTGWNETIVENLLANVYHQINHLKTVLEEKLEKEDFTRGKLMSSLHLKRYYGRILHYLKAKEYSHCAWTIVRVEILRNFYFINRLTGYLRN

SEQ ID NO: 170 - protein, 166 aa, Homo sapiens
  K52T
MSYNLLGFLQRSSNFQCQKLLWQLNGRLEYCLKDRMNFDIPEEIKQLQQFQTEDAALTIYEMLQNIFAIFRQDSSSTGWNETIVENLLANVYHQINHLKTVLEEKLEKEDFTRGKLMSSLHLKRYYGRILHYLKAKEYSHCAWTIVRVEILRNFYFINRLTGYLRN

SEQ ID NO: 171 - protein, 166 aa, Homo sapiens
  K52S
MSYNLLGFLQRSSNFQCQKLLWQLNGRLEYCLKDRMNFDIPEEIKQLQQFQSEDAALTIYEMLQNIFAIFRQDSSSTGWNETIVENLLANVYHQINHLKTVLEEKLEKEDFTRGKLMSSLHLKRYYGRILHYLKAKEYSHCAWTIVRVEILRNFYFINRLTGYLRN

SEQ ID NO: 172 - protein, 166 aa, Homo sapiens
  K52H
MSYNLLGFLQRSSNFQCQKLLWQLNGRLEYCLKDRMNFDIPEEIKQLQQFQHEDAALTIYEMLQNIFAIFRQDSSSTGWNETIVENLLANVYHQINHLKTVLEEKLEKEDFTRGKLMSSLHLKRYYGRILHYLKAKEYSHCAWTIVRVEILRNFYFINRLTGYLRN

SEQ ID NO: 173 - protein, 166 aa, Homo sapiens
  F67I
MSYNLLGFLQRSSNFQCQKLLWQLNGRLEYCLKDRMNFDIPEEIKQLQQFQKEDAALTIYEMLQNIIAIFRQDSSSTGWNETIVENLLANVYHQINHLKTVLEEKLEKEDFTRGKLMSSLHLKRYYGRILHYLKAKEYSHCAWTIVRVEILRNFYFINRLTGYLRN

SEQ ID NO: 174 - protein, 166 aa, Homo sapiens
  F67V
MSYNLLGFLQRSSNFQCQKLLWQLNGRLEYCLKDRMNFDIPEEIKQLQQFQKEDAALTIYEMLQNIVAIFRQDSSSTGWNETIVENLLANVYHQINHLKTVLEEKLEKEDFTRGKLMSSLHLKRYYGRILHYLKAKEYSHCAWTIVRVEILRNFYFINRLTGYLRN

SEQ ID NO: 175 - protein, 166 aa, Homo sapiens
  R71H
MSYNLLGFLQRSSNFQCQKLLWQLNGRLEYCLKDRMNFDIPEEIKQLQQFQKEDAALTIYEMLQNIFAIFHQDSSSTGWNETIVENLLANVYHQINHLKTVLEEKLEKEDFTRGKLMSSLHLKRYYGRILHYLKAKEYSHCAWTIVRVEILRNFYFINRLTGYLRN

SEQ ID NO: 176 - protein, 166 aa, Homo sapiens
  R71Q
MSYNLLGFLQRSSNFQCQKLLWQLNGRLEYCLKDRMNFDIPEEIKQLQQFQKEDAALTIYEMLQNIFAIFQQDSSSTGWNETIVENLLANVYHQINHLKTVLEEKLEKEDFTRGKLMSSLHLKRYYGRILHYLKAKEYSHCAWTIVRVEILRNFYFINRLTGYLRN

SEQ ID NO: 177 - protein, 166 aa, Homo sapiens
  D73Q
MSYNLLGFLQRSSNFQCQKLLWQLNGRLEYCLKDRMNFDIPEEIKQLQQFQKEDAALTIYEMLQNIFAIFRQQSSSTGWNETIVENLLANVYHQINHLKTVLEEKLEKEDFTRGKLMSSLHLKRYYGRILHYLKAKEYSHCAWTIVRVEILRNFYFINRLTGYLRN

SEQ ID NO: 178 - protein, 166 aa, Homo sapiens
  D73H
MSYNLLGFLQRSSNFQCQKLLWQLNGRLEYCLKDRMNFDIPEEIKQLQQFQKEDAALTIYEMLQNIFAIFRQHSSSTGWNETIVENLLANVYHQINHLKTVLEEKLEKEDFTRGKLMSSLHLKRYYGRILHYLKAKEYSHCAWTIVRVEILRNFYFINRLTGYLRN

SEQ ID NO: 179 - protein, 166 aa, Homo sapiens
  D73G
MSYNLLGFLQRSSNFQCQKLLWQLNGRLEYCLKDRMNFDIPEEIKQLQQFQKEDAALTIYEMLQNIFAIFRQGSSSTGWNETIVENLLANVYHQINHLKTVLEEKLEKEDFTRGKLMSSLHLKRYYGRILHYLKAKEYSHCAWTIVRVEILRNFYFINRLTGYLRN

SEQ ID NO: 180 - protein, 166 aa, Homo sapiens
  E81Q
MSYNLLGFLQRSSNFQCQKLLWQLNGRLEYCLKDRMNFDIPEEIKQLQQFQKEDAALTIYEMLQNIFAIFRQDSSSTGWNQTIVENLLANVYHQINHLKTVLEEKLEKEDFTRGKLMSSLHLKRYYGRILHYLKAKEYSHCAWTIVRVEILRNFYFINRLTGYLRN

SEQ ID NO: 181 - protein, 166 aa, Homo sapiens
  E81H
MSYNLLGFLQRSSNFQCQKLLWQLNGRLEYCLKDRMNFDIPEEIKQLQQFQKEDAALTIYEMLQNIFAIFRQDSSSTGWNHTIVENLLANVYHQINHLKTVLEEKLEKEDFTRGKLMSSLHLKRYYGRILHYLKAKEYSHCAWTIVRVEILRNFYFINRLTGYLRN

SEQ ID NO: 182 - protein, 166 aa, Homo sapiens
  E85Q
MSYNLLGFLQRSSNFQCQKLLWQLNGRLEYCLKDRMNFDIPEEIKQLQQFQKEDAALTIYEMLQNIFAIFRQDSSSTGWNETIVQNLLANVYHQINHLKTVLEEKLEKEDFTRGKLMSSLHLKRYYGRILHYLKAKEYSHCAWTIVRVEILRNFYFINRLTGYLRN

SEQ ID NO: 183 - protein, 166 aa, Homo sapiens
  E85H
MSYNLLGFLQRSSNFQCQKLLWQLNGRLEYCLKDRMNFDIPEEIKQLQQFQKEDAALTIYEMLQNIFAIFRQDSSSTGWNETIVHNLLANVYHQINHLKTVLEEKLEKEDFTRGKLMSSLHLKRYYGRILHYLKAKEYSHCAWTIVRVEILRNFYFINRLTGYLRN

SEQ ID NO: 184 - protein, 166 aa, Homo sapiens
  Y92H
MSYNLLGFLQRSSNFQCQKLLWQLNGRLEYCLKDRMNFDIPEEIKQLQQFQKEDAALTIYEMLQNIFAIFRQDSSSTGWNETIVENLLANVHHQINHLKTVLEEKLEKEDFTRGKLMSSLHLKRYYGRILHYLKAKEYSHCAWTIVRVEILRNFYFINRLTGYLRN

SEQ ID NO: 185 - protein, 166 aa, Homo sapiens
  Y92I
MSYNLLGFLQRSSNFQCQKLLWQLNGRLEYCLKDRMNFDIPEEIKQLQQFQKEDAALTIYEMLQNIFAIFRQDSSSTGWNETIVENLLANVIHQINHLKTVLEEKLEKEDFTRGKLMSSLHLKRYYGRILHYLKAKEYSHCAWTIVRVEILRNFYFINRLTGYLRN

SEQ ID NO: 186 - protein, 166 aa, Homo sapiens
  K99Q
MSYNLLGFLQRSSNFQCQKLLWQLNGRLEYCLKDRMNFDIPEEIKQLQQFQKEDAALTIYEMLQNIFAIFRQDSSSTGWNETIVENLLANVYHQINHLQTVLEEKLEKEDFTRGKLMSSLHLKRYYGRILHYLKAKEYSHCAWTIVRVEILRNFYFINRLTGYLRN

SEQ ID NO: 187 - protein, 166 aa, Homo sapiens
  K99T
MSYNLLGFLQRSSNFQCQKLLWQLNGRLEYCLKDRMNFDIPEEIKQLQQFQKEDAALTIYEMLQNIFAIFRQDSSSTGWNETIVENLLANVYHQINHLTTVLEEKLEKEDFTRGKLMSSLHLKRYYGRILHYLKAKEYSHCAWTIVRVEILRNFYFINRLTGYLRN

SEQ ID NO: 188 - protein, 166 aa, Homo sapiens
  K99S
MSYNLLGFLQRSSNFQCQKLLWQLNGRLEYCLKDRMNFDIPEEIKQLQQFQKEDAALTIYEMLQNIFAIFRQDSSSTGWNETIVENLLANVYHQINHLSTVLEEKLEKEDFTRGKLMSSLHLKRYYGRILHYLKAKEYSHCAWTIVRVEILRNFYFINRLTGYLRN

SEQ ID NO: 189 - protein, 166 aa, Homo sapiens
  K99H
MSYNLLGFLQRSSNFQCQKLLWQLNGRLEYCLKDRMNFDIPEEIKQLQQFQKEDAALTIYEMLQNIFAIFRQDSSSTGWNETIVENLLANVYHQINHLHTVLEEKLEKEDFTRGKLMSSLHLKRYYGRILHYLKAKEYSHCAWTIVRVEILRNFYFINRLTGYLRN

SEQ ID NO: 190 - protein, 166 aa, Homo sapiens
  E103Q
MSYNLLGFLQRSSNFQCQKLLWQLNGRLEYCLKDRMNFDIPEEIKQLQQFQKEDAALTIYEMLQNIFAIFRQDSSSTGWNETIVENLLANVYHQINHLKTVLQEKLEKEDFTRGKLMSSLHLKRYYGRILHYLKAKEYSHCAWTIVRVEILRNFYFINRLTGYLRN

SEQ ID NO: 191 - protein, 166 aa, Homo sapiens
  E103H
MSYNLLGFLQRSSNFQCQKLLWQLNGRLEYCLKDRMNFDIPEEIKQLQQFQKEDAALTIYEMLQNIFAIFRQDSSSTGWNETIVENLLANVYHQINHLKTVLHEKLEKEDFTRGKLMSSLHLKRYYGRILHYLKAKEYSHCAWTIVRVEILRNFYFINRLTGYLRN

SEQ ID NO: 192 - protein, 166 aa, Homo sapiens
  E104Q
MSYNLLGFLQRSSNFQCQKLLWQLNGRLEYCLKDRMNFDIPEEIKQLQQFQKEDAALTIYEMLQNIFAIFRQDSSSTGWNETIVENLLANVYHQINHLKTVLEQKLEKEDFTRGKLMSSLHLKRYYGRILHYLKAKEYSHCAWTIVRVEILRNFYFINRLTGYLRN

SEQ ID NO: 193 - protein, 166 aa, Homo sapiens
  E104H
MSYNLLGFLQRSSNFQCQKLLWQLNGRLEYCLKDRMNFDIPEEIKQLQQFQKEDAALTIYEMLQNIFAIFRQDSSSTGWNETIVENLLANVYHQINHLKTVLEHKLEKEDFTRGKLMSSLHLKRYYGRILHYLKAKEYSHCAWTIVRVEILRNFYFINRLTGYLRN

SEQ ID NO: 194 - protein, 166 aa, Homo sapiens
  K105Q
MSYNLLGFLQRSSNFQCQKLLWQLNGRLEYCLKDRMNFDIPEEIKQLQQFQKEDAALTIYEMLQNIFAIFRQDSSSTGWNETIVENLLANVYHQINHLKTVLEEQLEKEDFTRGKLMSSLHLKRYYGRILHYLKAKEYSHCAWTIVRVEILRNFYFINRLTGYLRN

SEQ ID NO: 195 - protein, 166 aa, Homo sapiens
  K105T
MSYNLLGFLQRSSNFQCQKLLWQLNGRLEYCLKDRMNFDIPEEIKQLQQFQKEDAALTIYEMLQNIFAIFRQDSSSTGWNETIVENLLANVYHQINHLKTVLEETLEKEDFTRGKLMSSLHLKRYYGRILHYLKAKEYSHCAWTIVRVEILRNFYFINRLTGYLRN

SEQ ID NO: 196 - protein, 166 aa, Homo sapiens
  K105S
MSYNLLGFLQRSSNFQCQKLLWQLNGRLEYCLKDRMNFDIPEEIKQLQQFQKEDAALTIYEMLQNIFAIFRQDSSSTGWNETIVENLLANVYHQINHLKTVLEESLEKEDFTRGKLMSSLHLKRYYGRILHYLKAKEYSHCAWTIVRVEILRNFYFINRLTGYLRN

SEQ ID NO: 197 - protein, 166 aa, Homo sapiens
  K105H
MSYNLLGFLQRSSNFQCQKLLWQLNGRLEYCLKDRMNFDIPEEIKQLQQFQKEDAALTIYEMLQNIFAIFRQDSSSTGWNETIVENLLANVYHQINHLKTVLEEHLEKEDFTRGKLMSSLHLKRYYGRILHYLKAKEYSHCAWTIVRVEILRNFYFINRLTGYLRN

SEQ ID NO: 198 - protein, 166 aa, Homo sapiens
  E107Q
MSYNLLGFLQRSSNFQCQKLLWQLNGRLEYCLKDRMNFDIPEEIKQLQQFQKEDAALTIYEMLQNIFAIFRQDSSSTGWNETIVENLLANVYHQINHLKTVLEEKLQKEDFTRGKLMSSLHLKRYYGRILHYLKAKEYSHCAWTIVRVEILRNFYFINRLTGYLRN

SEQ ID NO: 199 - protein, 166 aa, Homo sapiens
  E107H
MSYNLLGFLQRSSNFQCQKLLWQLNGRLEYCLKDRMNFDIPEEIKQLQQFQKEDAALTIYEMLQNIFAIFRQDSSSTGWNETIVENLLANVYHQINHLKTVLEEKLHKEDFTRGKLMSSLHLKRYYGRILHYLKAKEYSHCAWTIVRVEILRNFYFINRLTGYLRN

SEQ ID NO: 200 - protein, 166 aa, Homo sapiens
  K108Q
MSYNLLGFLQRSSNFQCQKLLWQLNGRLEYCLKDRMNFDIPEEIKQLQQFQKEDAALTIYEMLQNIFAIFRQDSSSTGWNETIVENLLANVYHQINHLKTVLEEKLEQEDFTRGKLMSSLHLKRYYGRILHYLKAKEYSHCAWTIVRVEILRNFYFINRLTGYLRN

SEQ ID NO: 201 - protein, 166 aa, Homo sapiens
  K108T
MSYNLLGFLQRSSNFQCQKLLWQLNGRLEYCLKDRMNFDIPEEIKQLQQFQKEDAALTIYEMLQNIFAIFRQDSSSTGWNETIVENLLANVYHQINHLKTVLEEKLETEDFTRGKLMSSLHLKRYYGRILHYLKAKEYSHCAWTIVRVEILRNFYFINRLTGYLRN

SEQ ID NO: 202 - protein, 166 aa, Homo sapiens
  K108S
MSYNLLGFLQRSSNFQCQKLLWQLNGRLEYCLKDRMNFDIPEEIKQLQQFQKEDAALTIYEMLQNIFAIFRQDSSSTGWNETIVENLLANVYHQINHLKTVLEEKLESEDFTRGKLMSSLHLKRYYGRILHYLKAKEYSHCAWTIVRVEILRNFYFINRLTGYLRN

SEQ ID NO: 203 - protein, 166 aa, Homo sapiens
  K108H
MSYNLLGFLQRSSNFQCQKLLWQLNGRLEYCLKDRMNFDIPEEIKQLQQFQKEDAALTIYEMLQNIFAIFRQDSSSTGWNETIVENLLANVYHQINHLKTVLEEKLEHEDFTRGKLMSSLHLKRYYGRILHYLKAKEYSHCAWTIVRVEILRNFYFINRLTGYLRN

SEQ ID NO: 204 - protein, 166 aa, Homo sapiens
  E109Q
MSYNLLGFLQRSSNFQCQKLLWQLNGRLEYCLKDRMNFDIPEEIKQLQQFQKEDAALTIYEMLQNIFAIFRQDSSSTGWNETIVENLLANVYHQINHLKTVLEEKLEKQDFTRGKLMSSLHLKRYYGRILHYLKAKEYSHCAWTIVRVEILRNFYFINRLTGYLRN

SEQ ID NO: 205 - protein, 166 aa, Homo sapiens
  E109H
MSYNLLGFLQRSSNFQCQKLLWQLNGRLEYCLKDRMNFDIPEEIKQLQQFQKEDAALTIYEMLQNIFAIFRQDSSSTGWNETIVENLLANVYHQINHLKTVLEEKLEKHDFTRGKLMSSLHLKRYYGRILHYLKAKEYSHCAWTIVRVEILRNFYFINRLTGYLRN

SEQ ID NO: 206 - protein, 166 aa, Homo sapiens
  D110Q
MSYNLLGFLQRSSNFQCQKLLWQLNGRLEYCLKDRMNFDIPEEIKQLQQFQKEDAALTIYEMLQNIFAIFRQDSSSTGWNETIVENLLANVYHQINHLKTVLEEKLEKEQFTRGKLMSSLHLKRYYGRILHYLKAKEYSHCAWTIVRVEILRNFYFINRLTGYLRN

SEQ ID NO: 207 - protein, 166 aa, Homo sapiens
  D110H
MSYNLLGFLQRSSNFQCQKLLWQLNGRLEYCLKDRMNFDIPEEIKQLQQFQKEDAALTIYEMLQNIFAIFRQDSSSTGWNETIVENLLANVYHQINHLKTVLEEKLEKEHFTRGKLMSSLHLKRYYGRILHYLKAKEYSHCAWTIVRVEILRNFYFINRLTGYLRN

SEQ ID NO: 208 - protein, 166 aa, Homo sapiens
  D110G
MSYNLLGFLQRSSNFQCQKLLWQLNGRLEYCLKDRMNFDIPEEIKQLQQFQKEDAALTIYEMLQNIFAIFRQDSSSTGWNETIVENLLANVYHQINHLKTVLEEKLEKEGFTRGKLMSSLHLKRYYGRILHYLKAKEYSHCAWTIVRVEILRNFYFINRLTGYLRN

SEQ ID NO: 209 - protein, 166 aa, Homo sapiens
  F111I
MSYNLLGFLQRSSNFQCQKLLWQLNGRLEYCLKDRMNFDIPEEIKQLQQFQKEDAALTIYEMLQNIFAIFRQDSSSTGWNETIVENLLANVYHQINHLKTVLEEKLEKEDITRGKLMSSLHLKRYYGRILHYLKAKEYSHCAWTIVRVEILRNFYFINRLTGYLRN

SEQ ID NO: 210 - protein, 166 aa, Homo sapiens
  F111V
MSYNLLGFLQRSSNFQCQKLLWQLNGRLEYCLKDRMNFDIPEEIKQLQQFQKEDAALTIYEMLQNIFAIFRQDSSSTGWNETIVENLLANVYHQINHLKTVLEEKLEKEDVTRGKLMSSLHLKRYYGRILHYLKAKEYSHCAWTIVRVEILRNFYFINRLTGYLRN

SEQ ID NO: 211 - protein, 166 aa, Homo sapiens
  R113H
MSYNLLGFLQRSSNFQCQKLLWQLNGRLEYCLKDRMNFDIPEEIKQLQQFQKEDAALTIYEMLQNIFAIFRQDSSSTGWNETIVENLLANVYHQINHLKTVLEEKLEKEDFTHGKLMSSLHLKRYYGRILHYLKAKEYSHCAWTIVRVEILRNFYFINRLTGYLRN

SEQ ID NO: 212 - protein, 166 aa, Homo sapiens
  R113Q
MSYNLLGFLQRSSNFQCQKLLWQLNGRLEYCLKDRMNFDIPEEIKQLQQFQKEDAALTIYEMLQNIFAIFRQDSSSTGWNETIVENLLANVYHQINHLKTVLEEKLEKEDFTQGKLMSSLHLKRYYGRILHYLKAKEYSHCAWTIVRVEILRNFYFINRLTGYLRN

SEQ ID NO: 213 - protein, 166 aa, Homo sapiens
  L116V
MSYNLLGFLQRSSNFQCQKLLWQLNGRLEYCLKDRMNFDIPEEIKQLQQFQKEDAALTIYEMLQNIFAIFRQDSSSTGWNETIVENLLANVYHQINHLKTVLEEKLEKEDFTRGKVMSSLHLKRYYGRILHYLKAKEYSHCAWTIVRVEILRNFYFINRLTGYLRN

SEQ ID NO: 214 - protein, 166 aa, Homo sapiens
  L116I
MSYNLLGFLQRSSNFQCQKLLWQLNGRLEYCLKDRMNFDIPEEIKQLQQFQKEDAALTIYEMLQNIFAIFRQDSSSTGWNETIVENLLANVYHQINHLKTVLEEKLEKEDFTRGKIMSSLHLKRYYGRILHYLKAKEYSHCAWTIVRVEILRNFYFINRLTGYLRN

SEQ ID NO: 215 - protein, 166 aa, Homo sapiens
  L116T
MSYNLLGFLQRSSNFQCQKLLWQLNGRLEYCLKDRMNFDIPEEIKQLQQFQKEDAALTIYEMLQNIFAIFRQDSSSTGWNETIVENLLANVYHQINHLKTVLEEKLEKEDFTRGKTMSSLHLKRYYGRILHYLKAKEYSHCAWTIVRVEILRNFYFINRLTGYLRN

SEQ ID NO: 216 - protein, 166 aa, Homo sapiens
  L116Q
MSYNLLGFLQRSSNFQCQKLLWQLNGRLEYCLKDRMNFDIPEEIKQLQQFQKEDAALTIYEMLQNIFAIFRQDSSSTGWNETIVENLLANVYHQINHLKTVLEEKLEKEDFTRGKQMSSLHLKRYYGRILHYLKAKEYSHCAWTIVRVEILRNFYFINRLTGYLRN

SEQ ID NO: 217 - protein, 166 aa, Homo sapiens
  L116H
MSYNLLGFLQRSSNFQCQKLLWQLNGRLEYCLKDRMNFDIPEEIKQLQQFQKEDAALTIYEMLQNIFAIFRQDSSSTGWNETIVENLLANVYHQINHLKTVLEEKLEKEDFTRGKHMSSLHLKRYYGRILHYLKAKEYSHCAWTIVRVEILRNFYFINRLTGYLRN

SEQ ID NO: 218 - protein, 166 aa, Homo sapiens
  L116A
MSYNLLGFLQRSSNFQCQKLLWQLNGRLEYCLKDRMNFDIPEEIKQLQQFQKEDAALTIYEMLQNIFAIFRQDSSSTGWNETIVENLLANVYHQINHLKTVLEEKLEKEDFTRGKAMSSLHLKRYYGRILHYLKAKEYSHCAWTIVRVEILRNFYFINRLTGYLRN

SEQ ID NO: 219 - protein, 166 aa, Homo sapiens
  L120V
MSYNLLGFLQRSSNFQCQKLLWQLNGRLEYCLKDRMNFDIPEEIKQLQQFQKEDAALTIYEMLQNIFAIFRQDSSSTGWNETIVENLLANVYHQINHLKTVLEEKLEKEDFTRGKLMSSVHLKRYYGRILHYLKAKEYSHCAWTIVRVEILRNFYFINRLTGYLRN

SEQ ID NO: 220 - protein, 166 aa, Homo sapiens
  L120I
MSYNLLGFLQRSSNFQCQKLLWQLNGRLEYCLKDRMNFDIPEEIKQLQQFQKEDAALTIYEMLQNIFAIFRQDSSSTGWNETIVENLLANVYHQINHLKTVLEEKLEKEDFTRGKLMSSIHLKRYYGRILHYLKAKEYSHCAWTIVRVEILRNFYFINRLTGYLRN

SEQ ID NO: 221 - protein, 166 aa, Homo sapiens
  L120T
MSYNLLGFLQRSSNFQCQKLLWQLNGRLEYCLKDRMNFDIPEEIKQLQQFQKEDAALTIYEMLQNIFAIFRQDSSSTGWNETIVENLLANVYHQINHLKTVLEEKLEKEDFTRGKLMSSTHLKRYYGRILHYLKAKEYSHCAWTIVRVEILRNFYFINRLTGYLRN

SEQ ID NO: 222 - protein, 166 aa, Homo sapiens
  L120Q
MSYNLLGFLQRSSNFQCQKLLWQLNGRLEYCLKDRMNFDIPEEIKQLQQFQKEDAALTIYEMLQNIFAIFRQDSSSTGWNETIVENLLANVYHQINHLKTVLEEKLEKEDFTRGKLMSSQHLKRYYGRILHYLKAKEYSHCAWTIVRVEILRNFYFINRLTGYLRN

SEQ ID NO: 223 - protein, 166 aa, Homo sapiens
  L120H
MSYNLLGFLQRSSNFQCQKLLWQLNGRLEYCLKDRMNFDIPEEIKQLQQFQKEDAALTIYEMLQNIFAIFRQDSSSTGWNETIVENLLANVYHQINHLKTVLEEKLEKEDFTRGKLMSSHHLKRYYGRILHYLKAKEYSHCAWTIVRVEILRNFYFINRLTGYLRN

SEQ ID NO: 224 - protein, 166 aa, Homo sapiens
  L120A
MSYNLLGFLQRSSNFQCQKLLWQLNGRLEYCLKDRMNFDIPEEIKQLQQFQKEDAALTIYEMLQNIFAIFRQDSSSTGWNETIVENLLANVYHQINHLKTVLEEKLEKEDFTRGKLMSSAHLKRYYGRILHYLKAKEYSHCAWTIVRVEILRNFYFINRLTGYLRN

SEQ ID NO: 225 - protein, 166 aa, Homo sapiens
  K123Q
MSYNLLGFLQRSSNFQCQKLLWQLNGRLEYCLKDRMNFDIPEEIKQLQQFQKEDAALTIYEMLQNIFAIFRQDSSSTGWNETIVENLLANVYHQINHLKTVLEEKLEKEDFTRGKLMSSLHLQRYYGRILHYLKAKEYSHCAWTIVRVEILRNFYFINRLTGYLRN

SEQ ID NO: 226 - protein, 166 aa, Homo sapiens
  K123T
MSYNLLGFLQRSSNFQCQKLLWQLNGRLEYCLKDRMNFDIPEEIKQLQQFQKEDAALTIYEMLQNIFAIFRQDSSSTGWNETIVENLLANVYHQINHLKTVLEEKLEKEDFTRGKLMSSLHLTRYYGRILHYLKAKEYSHCAWTIVRVEILRNFYFINRLTGYLRN

SEQ ID NO: 227 - protein, 166 aa, Homo sapiens
  K123S
MSYNLLGFLQRSSNFQCQKLLWQLNGRLEYCLKDRMNFDIPEEIKQLQQFQKEDAALTIYEMLQNIFAIFRQDSSSTGWNETIVENLLANVYHQINHLKTVLEEKLEKEDFTRGKLMSSLHLSRYYGRILHYLKAKEYSHCAWTIVRVEILRNFYFINRLTGYLRN

SEQ ID NO: 228 - protein, 166 aa, Homo sapiens
  K123H
MSYNLLGFLQRSSNFQCQKLLWQLNGRLEYCLKDRMNFDIPEEIKQLQQFQKEDAALTIYEMLQNIFAIFRQDSSSTGWNETIVENLLANVYHQINHLKTVLEEKLEKEDFTRGKLMSSLHLHRYYGRILHYLKAKEYSHCAWTIVRVEILRNFYFINRLTGYLRN

SEQ ID NO: 229 - protein, 166 aa, Homo sapiens
  R124H
MSYNLLGFLQRSSNFQCQKLLWQLNGRLEYCLKDRMNFDIPEEIKQLQQFQKEDAALTIYEMLQNIFAIFRQDSSSTGWNETIVENLLANVYHQINHLKTVLEEKLEKEDFTRGKLMSSLHLKHYYGRILHYLKAKEYSHCAWTIVRVEILRNFYFINRLTGYLRN

SEQ ID NO: 230 - protein, 166 aa, Homo sapiens
  R124Q
MSYNLLGFLQRSSNFQCQKLLWQLNGRLEYCLKDRMNFDIPEEIKQLQQFQKEDAALTIYEMLQNIFAIFRQDSSSTGWNETIVENLLANVYHQINHLKTVLEEKLEKEDFTRGKLMSSLHLKQYYGRILHYLKAKEYSHCAWTIVRVEILRNFYFINRLTGYLRN

SEQ ID NO: 231 - protein, 166 aa, Homo sapiens
  R128H
MSYNLLGFLQRSSNFQCQKLLWQLNGRLEYCLKDRMNFDIPEEIKQLQQFQKEDAALTIYEMLQNIFAIFRQDSSSTGWNETIVENLLANVYHQINHLKTVLEEKLEKEDFTRGKLMSSLHLKRYYGHILHYLKAKEYSHCAWTIVRVEILRNFYFINRLTGYLRN

SEQ ID NO: 232 - protein, 166 aa, Homo sapiens
  R128Q
MSYNLLGFLQRSSNFQCQKLLWQLNGRLEYCLKDRMNFDIPEEIKQLQQFQKEDAALTIYEMLQNIFAIFRQDSSSTGWNETIVENLLANVYHQINHLKTVLEEKLEKEDFTRGKLMSSLHLKRYYGQILHYLKAKEYSHCAWTIVRVEILRNFYFINRLTGYLRN

SEQ ID NO: 233 - protein, 166 aa, Homo sapiens
  L130V
MSYNLLGFLQRSSNFQCQKLLWQLNGRLEYCLKDRMNFDIPEEIKQLQQFQKEDAALTIYEMLQNIFAIFRQDSSSTGWNETIVENLLANVYHQINHLKTVLEEKLEKEDFTRGKLMSSLHLKRYYGRIVHYLKAKEYSHCAWTIVRVEILRNFYFINRLTGYLRN

SEQ ID NO: 234 - protein, 166 aa, Homo sapiens
  L130I
MSYNLLGFLQRSSNFQCQKLLWQLNGRLEYCLKDRMNFDIPEEIKQLQQFQKEDAALTIYEMLQNIFAIFRQDSSSTGWNETIVENLLANVYHQINHLKTVLEEKLEKEDFTRGKLMSSLHLKRYYGRIIHYLKAKEYSHCAWTIVRVEILRNFYFINRLTGYLRN

SEQ ID NO: 235 - protein, 166 aa, Homo sapiens
  L130T
MSYNLLGFLQRSSNFQCQKLLWQLNGRLEYCLKDRMNFDIPEEIKQLQQFQKEDAALTIYEMLQNIFAIFRQDSSSTGWNETIVENLLANVYHQINHLKTVLEEKLEKEDFTRGKLMSSLHLKRYYGRITHYLKAKEYSHCAWTIVRVEILRNFYFINRLTGYLRN

SEQ ID NO: 236 - protein, 166 aa, Homo sapiens
  L130T
MSYNLLGFLQRSSNFQCQKLLWQLNGRLEYCLKDRMNFDIPEEIKQLQQFQKEDAALTIYEMLQNIFAIFRQDSSSTGWNETIVENLLANVYHQINHLKTVLEEKLEKEDFTRGKLMSSLHLKRYYGRIQHYLKAKEYSHCAWTIVRVEILRNFYFINRLTGYLRN

SEQ ID NO: 237 - protein, 166 aa, Homo sapiens
  L130H
MSYNLLGFLQRSSNFQCQKLLWQLNGRLEYCLKDRMNFDIPEEIKQLQQFQKEDAALTIYEMLQNIFAIFRQDSSSTGWNETIVENLLANVYHQINHLKTVLEEKLEKEDFTRGKLMSSLHLKRYYGRIHHYLKAKEYSHCAWTIVRVEILRNFYFINRLTGYLRN

SEQ ID NO: 238 - protein, 166 aa, Homo sapiens
  L130A
MSYNLLGFLQRSSNFQCQKLLWQLNGRLEYCLKDRMNFDIPEEIKQLQQFQKEDAALTIYEMLQNIFAIFRQDSSSTGWNETIVENLLANVYHQINHLKTVLEEKLEKEDFTRGKLMSSLHLKRYYGRIAHYLKAKEYSHCAWTIVRVEILRNFYFINRLTGYLRN

SEQ ID NO: 239 - protein, 166 aa, Homo sapiens
  K134Q
MSYNLLGFLQRSSNFQCQKLLWQLNGRLEYCLKDRMNFDIPEEIKQLQQFQKEDAALTIYEMLQNIFAIFRQDSSSTGWNETIVENLLANVYHQINHLKTVLEEKLEKEDFTRGKLMSSLHLKRYYGRILHYLQAKEYSHCAWTIVRVEILRNFYFINRLTGYLRN

SEQ ID NO: 240 - protein, 166 aa, Homo sapiens
  K134T
MSYNLLGFLQRSSNFQCQKLLWQLNGRLEYCLKDRMNFDIPEEIKQLQQFQKEDAALTIYEMLQNIFAIFRQDSSSTGWNETIVENLLANVYHQINHLKTVLEEKLEKEDFTRGKLMSSLHLKRYYGRILHYLTAKEYSHCAWTIVRVEILRNFYFINRLTGYLRN

SEQ ID NO: 241 - protein, 166 aa, Homo sapiens
  K134S
MSYNLLGFLQRSSNFQCQKLLWQLNGRLEYCLKDRMNFDIPEEIKQLQQFQKEDAALTIYEMLQNIFAIFRQDSSSTGWNETIVENLLANVYHQINHLKTVLEEKLEKEDFTRGKLMSSLHLKRYYGRILHYLSAKEYSHCAWTIVRVEILRNFYFINRLTGYLRN

SEQ ID NO: 242 - protein, 166 aa, Homo sapiens
  K134H
MSYNLLGFLQRSSNFQCQKLLWQLNGRLEYCLKDRMNFDIPEEIKQLQQFQKEDAALTIYEMLQNIFAIFRQDSSSTGWNETIVENLLANVYHQINHLKTVLEEKLEKEDFTRGKLMSSLHLKRYYGRILHYLHAKEYSHCAWTIVRVEILRNFYFINRLTGYLRN

SEQ ID NO: 243 - protein, 166 aa, Homo sapiens
  K136Q
MSYNLLGFLQRSSNFQCQKLLWQLNGRLEYCLKDRMNFDIPEEIKQLQQFQKEDAALTIYEMLQNIFAIFRQDSSSTGWNETIVENLLANVYHQINHLKTVLEEKLEKEDFTRGKLMSSLHLKRYYGRILHYLKAQEYSHCAWTIVRVEILRNFYFINRLTGYLRN

SEQ ID NO: 244 - protein, 166 aa, Homo sapiens
  K136T
MSYNLLGFLQRSSNFQCQKLLWQLNGRLEYCLKDRMNFDIPEEIKQLQQFQKEDAALTIYEMLQNIFAIFRQDSSSTGWNETIVENLLANVYHQINHLKTVLEEKLEKEDFTRGKLMSSLHLKRYYGRILHYLKATEYSHCAWTIVRVEILRNFYFINRLTGYLRN

SEQ ID NO: 245 - protein, 166 aa, Homo sapiens
  K136S
MSYNLLGFLQRSSNFQCQKLLWQLNGRLEYCLKDRMNFDIPEEIKQLQQFQKEDAALTIYEMLQNIFAIFRQDSSSTGWNETIVENLLANVYHQINHLKTVLEEKLEKEDFTRGKLMSSLHLKRYYGRILHYLKASEYSHCAWTIVRVEILRNFYFINRLTGYLRN

SEQ ID NO: 246 - protein, 166 aa, Homo sapiens
  K136H
MSYNLLGFLQRSSNFQCQKLLWQLNGRLEYCLKDRMNFDIPEEIKQLQQFQKEDAALTIYEMLQNIFAIFRQDSSSTGWNETIVENLLANVYHQINHLKTVLEEKLEKEDFTRGKLMSSLHLKRYYGRILHYLKAHEYSHCAWTIVRVEILRNFYFINRLTGYLRN

SEQ ID NO: 247 - protein, 166 aa, Homo sapiens
  E137Q
MSYNLLGFLQRSSNFQCQKLLWQLNGRLEYCLKDRMNFDIPEEIKQLQQFQKEDAALTIYEMLQNIFAIFRQDSSSTGWNETIVENLLANVYHQINHLKTVLEEKLEKEDFTRGKLMSSLHLKRYYGRILHYLKAKQYSHCAWTIVRVEILRNFYFINRLTGYLRN

SEQ ID NO: 248 - protein, 166 aa, Homo sapiens
  E137H
MSYNLLGFLQRSSNFQCQKLLWQLNGRLEYCLKDRMNFDIPEEIKQLQQFQKEDAALTIYEMLQNIFAIFRQDSSSTGWNETIVENLLANVYHQINHLKTVLEEKLEKEDFTRGKLMSSLHLKRYYGRILHYLKAKHYSHCAWTIVRVEILRNFYFINRLTGYLRN

SEQ ID NO: 249 - protein, 166 aa, Homo sapiens
  Y163H
MSYNLLGFLQRSSNFQCQKLLWQLNGRLEYCLKDRMNFDIPEEIKQLQQFQKEDAALTIYEMLQNIFAIFRQDSSSTGWNETIVENLLANVYHQINHLKTVLEEKLEKEDFTRGKLMSSLHLKRYYGRILHYLKAKEYSHCAWTIVRVEILRNFYFINRLTGHLRN

SEQ ID NO: 250 - protein, 166 aa, Homo sapiens
  Y163I
MSYNLLGFLQRSSNFQCQKLLWQLNGRLEYCLKDRMNFDIPEEIKQLQQFQKEDAALTIYEMLQNIFAIFRQDSSSTGWNETIVENLLANVYHQINHLKTVLEEKLEKEDFTRGKLMSSLHLKRYYGRILHYLKAKEYSHCAWTIVRVEILRNFYFINRLTGILRN

SEQ ID NO: 251 - protein, 166 aa, Homo sapiens
  R165H
MSYNLLGFLQRSSNFQCQKLLWQLNGRLEYCLKDRMNFDIPEEIKQLQQFQKEDAALTIYEMLQNIFAIFRQDSSSTGWNETIVENLLANVYHQINHLKTVLEEKLEKEDFTRGKLMSSLHLKRYYGRILHYLKAKEYSHCAWTIVRVEILRNFYFINRLTGYLHN

SEQ ID NO: 252 - protein, 166 aa, Homo sapiens
  R165Q
MSYNLLGFLQRSSNFQCQKLLWQLNGRLEYCLKDRMNFDIPEEIKQLQQFQKEDAALTIYEMLQNIFAIFRQDSSSTGWNETIVENLLANVYHQINHLKTVLEEKLEKEDFTRGKLMSSLHLKRYYGRILHYLKAKEYSHCAWTIVRVEILRNFYFINRLTGYLQN

SEQ ID NO: 253 - protein, 166 aa, Homo sapiens; identical to SEQ ID NO: 69
  Y138H

SEQ ID NO: 254 - protein, 166 aa, Homo sapiens; identical to SEQ ID NO: 70
  Y138I

SEQ ID NO: 255 - protein, 166 aa, Homo sapiens
  R152H
MSYNLLGFLQRSSNFQCQKLLWQLNGRLEYCLKDRMNFDIPEEIKQLQQFQKEDAALTIYEMLQNIFAIFRQDSSSTGWNETIVENLLANVYHQINHLKTVLEEKLEKEDFTRGKLMSSLHLKRYYGRILHYLKAKEYSHCAWTIVRVEILHNFYFINRLTGYLRN

SEQ ID NO: 256 - protein, 166 aa, Homo sapiens
  R152Q
MSYNLLGFLQRSSNFQCQKLLWQLNGRLEYCLKDRMNFDIPEEIKQLQQFQKEDAALTIYEMLQNIFAIFRQDSSSTGWNETIVENLLANVYHQINHLKTVLEEKLEKEDFTRGKLMSSLHLKRYYGRILHYLKAKEYSHCAWTIVRVEILQNFYFINRLTGYLRN

SEQ ID NO: 257 - protein, 166 aa, Homo sapiens
  Y155H
MSYNLLGFLQRSSNFQCQKLLWQLNGRLEYCLKDRMNFDIPEEIKQLQQFQKEDAALTIYEMLQNIFAIFRQDSSSTGWNETIVENLLANVYHQINHLKTVLEEKLEKEDFTRGKLMSSLHLKRYYGRILHYLKAKEYSHCAWTIVRVEILRNFHFINRLTGYLRN

SEQ ID NO: 258 - protein, 166 aa, Homo sapiens
  Y155I
MSYNLLGFLQRSSNFQCQKLLWQLNGRLEYCLKDRMNFDIPEEIKQLQQFQKEDAALTIYEMLQNIFAIFRQDSSSTGWNETIVENLLANVYHQINHLKTVLEEKLEKEDFTRGKLMSSLHLKRYYGRILHYLKAKEYSHCAWTIVRVEILRNFIFINRLTGYLRN

SEQ ID NO: 259 - protein, 166 aa, Homo sapiens
  R159H
MSYNLLGFLQRSSNFQCQKLLWQLNGRLEYCLKDRMNFDIPEEIKQLQQFQKEDAALTIYEMLQNIFAIFRQDSSSTGWNETIVENLLANVYHQINHLKTVLEEKLEKEDFTRGKLMSSLHLKRYYGRILHYLKAKEYSHCAWTIVRVEILRNFYFINHLTGYLRN

SEQ ID NO: 260 - protein, 166 aa, Homo sapiens
  R159Q
MSYNLLGFLQRSSNFQCQKLLWQLNGRLEYCLKDRMNFDIPEEIKQLQQFQKEDAALTIYEMLQNIFAIFRQDSSSTGWNETIVENLLANVYHQINHLKTVLEEKLEKEDFTRGKLMSSLHLKRYYGRILHYLKAKEYSHCAWTIVRVEILRNFYFINQLTGYLRN

SEQ ID NO: 261 - protein, 166 aa, Homo sapiens
  M1Q
QSYNLLGFLQRSSNFQCQKLLWQLNGRLEYCLKDRMNFDIPEEIKQLQQFQKEDAALTIYEMLQNIFAIFRQDSSSTGWNETIVENLLANVYHQINHLKTVLEEKLEKEDFTRGKLMSSLHLKRYYGRILHYLKAKEYSHCAWTIVRVEILRNFYFINRLTGYLRN

SEQ ID NO: 262 - protein, 166 aa, Homo sapiens
  M1V
VSYNLLGFLQRSSNFQCQKLLWQLNGRLEYCLKDRMNFDIPEEIKQLQQFQKEDAALTIYEMLQNIFAIFRQDSSSTGWNETIVENLLANVYHQINHLKTVLEEKLEKEDFTRGKLMSSLHLKRYYGRILHYLKAKEYSHCAWTIVRVEILRNFYFINRLTGYLRN

SEQ ID NO: 263 - protein, 166 aa, Homo sapiens
  M1I
ISYNLLGFLQRSSNFQCQKLLWQLNGRLEYCLKDRMNFDIPEEIKQLQQFQKEDAALTIYEMLQNIFAIFRQDSSSTGWNETIVENLLANVYHQINHLKTVLEEKLEKEDFTRGKLMSSLHLKRYYGRILHYLKAKEYSHCAWTIVRVEILRNFYFINRLTGYLRN

SEQ ID NO: 264 - protein, 166 aa, Homo sapiens
  M1T
TSYNLLGFLQRSSNFQCQKLLWQLNGRLEYCLKDRMNFDIPEEIKQLQQFQKEDAALTIYEMLQNIFAIFRQDSSSTGWNETIVENLLANVYHQINHLKTVLEEKLEKEDFTRGKLMSSLHLKRYYGRILHYLKAKEYSHCAWTIVRVEILRNFYFINRLTGYLRN

SEQ ID NO: 265 - protein, 166 aa, Homo sapiens
  M1A
ASYNLLGFLQRSSNFQCQKLLWQLNGRLEYCLKDRMNFDIPEEIKQLQQFQKEDAALTIYEMLQNIFAIFRQDSSSTGWNETIVENLLANVYHQINHLKTVLEEKLEKEDFTRGKLMSSLHLKRYYGRILHYLKAKEYSHCAWTIVRVEILRNFYFINRLTGYLRN

SEQ ID NO: 266 - protein, 166 aa, Homo sapiens
  L5V
MSYNVLGFLQRSSNFQCQKLLWQLNGRLEYCLKDRMNFDIPEEIKQLQQFQKEDAALTIYEMLQNIFAIFRQDSSSTGWNETIVENLLANVYHQINHLKTVLEEKLEKEDFTRGKLMSSLHLKRYYGRILHYLKAKEYSHCAWTIVRVEILRNFYFINRLTGYLRN

SEQ ID NO: 267 - protein, 166 aa, Homo sapiens
  L5I
MSYNILGFLQRSSNFQCQKLLWQLNGRLEYCLKDRMNFDIPEEIKQLQQFQKEDAALTIYEMLQNIFAIFRQDSSSTGWNETIVENLLANVYHQINHLKTVLEEKLEKEDFTRGKLMSSLHLKRYYGRILHYLKAKEYSHCAWTIVRVEILRNFYFINRLTGYLRN

SEQ ID NO: 268 - protein, 166 aa, Homo sapiens
  L5T
MSYNTLGFLQRSSNFQCQKLLWQLNGRLEYCLKDRMNFDIPEEIKQLQQFQKEDAALTIYEMLQNIFAIFRQDSSSTGWNETIVENLLANVYHQINHLKTVLEEKLEKEDFTRGKLMSSLHLKRYYGRILHYLKAKEYSHCAWTIVRVEILRNFYFINRLTGYLRN

SEQ ID NO: 269 - protein, 166 aa, Homo sapiens
  L5Q
MSYNQLGFLQRSSNFQCQKLLWQLNGRLEYCLKDRMNFDIPEEIKQLQQFQKEDAALTIYEMLQNIFAIFRQDSSSTGWNETIVENLLANVYHQINHLKTVLEEKLEKEDFTRGKLMSSLHLKRYYGRILHYLKAKEYSHCAWTIVRVEILRNFYFINRLTGYLRN

SEQ ID NO: 270 - protein, 166 aa, Homo sapiens
  L5H
MSYNHLGFLQRSSNFQCQKLLWQLNGRLEYCLKDRMNFDIPEEIKQLQQFQKEDAALTIYEMLQNIFAIFRQDSSSTGWNETIVENLLANVYHQINHLKTVLEEKLEKEDFTRGKLMSSLHLKRYYGRILHYLKAKEYSHCAWTIVRVEILRNFYFINRLTGYLRN

SEQ ID NO: 271 - protein, 166 aa, Homo sapiens
  L5A
MSYNALGFLQRSSNFQCQKLLWQLNGRLEYCLKDRMNFDIPEEIKQLQQFQKEDAALTIYEMLQNIFAIFRQDSSSTGWNETIVENLLANVYHQINHLKTVLEEKLEKEDFTRGKLMSSLHLKRYYGRILHYLKAKEYSHCAWTIVRVEILRNFYFINRLTGYLRN

SEQ ID NO: 272 - protein, 166 aa, Homo sapiens
  F8I
MSYNLLGILQRSSNFQCQKLLWQLNGRLEYCLKDRMNFDIPEEIKQLQQFQKEDAALTIYEMLQNIFAIFRQDSSSTGWNETIVENLLANVYHQINHLKTVLEEKLEKEDFTRGKLMSSLHLKRYYGRILHYLKAKEYSHCAWTIVRVEILRNFYFINRLTGYLRN

SEQ ID NO: 273 - protein, 166 aa, Homo sapiens
  F8V
MSYNLLGVLQRSSNFQCQKLLWQLNGRLEYCLKDRMNFDIPEEIKQLQQFQKEDAALTIYEMLQNIFAIFRQDSSSTGWNETIVENLLANVYHQINHLKTVLEEKLEKEDFTRGKLMSSLHLKRYYGRILHYLKAKEYSHCAWTIVRVEILRNFYFINRLTGYLRN

SEQ ID NO: 274 - protein, 166 aa, Homo sapiens
  L9V
MSYNLLGFVQRSSNFQCQKLLWQLNGRLEYCLKDRMNFDIPEEIKQLQQFQKEDAALTIYEMLQNIFAIFRQDSSSTGWNETIVENLLANVYHQINHLKTVLEEKLEKEDFTRGKLMSSLHLKRYYGRILHYLKAKEYSHCAWTIVRVEILRNFYFINRLTGYLRN

SEQ ID NO: 275 - protein, 166 aa, Homo sapiens
  L9I
MSYNLLGFIQRSSNFQCQKLLWQLNGRLEYCLKDRMNFDIPEEIKQLQQFQKEDAALTIYEMLQNIFAIFRQDSSSTGWNETIVENLLANVYHQINHLKTVLEEKLEKEDFTRGKLMSSLHLKRYYGRILHYLKAKEYSHCAWTIVRVEILRNFYFINRLTGYLRN

SEQ ID NO: 276 - protein, 166 aa, Homo sapiens
  L9T
MSYNLLGFTQRSSNFQCQKLLWQLNGRLEYCLKDRMNFDIPEEIKQLQQFQKEDAALTIYEMLQNIFAIFRQDSSSTGWNETIVENLLANVYHQINHLKTVLEEKLEKEDFTRGKLMSSLHLKRYYGRILHYLKAKEYSHCAWTIVRVEILRNFYFINRLTGYLRN

SEQ ID NO: 277 - protein, 166 aa, Homo sapiens
  L9Q
MSYNLLGFQQRSSNFQCQKLLWQLNGRLEYCLKDRMNFDIPEEIKQLQQFQKEDAALTIYEMLQNIFAIFRQDSSSTGWNETIVENLLANVYHQINHLKTVLEEKLEKEDFTRGKLMSSLHLKRYYGRILHYLKAKEYSHCAWTIVRVEILRNFYFINRLTGYLRN

SEQ ID NO: 278 - protein, 166 aa, Homo sapiens
  L9H
MSYNLLGFHQRSSNFQCQKLLWQLNGRLEYCLKDRMNFDIPEEIKQLQQFQKEDAALTIYEMLQNIFAIFRQDSSSTGWNETIVENLLANVYHQINHLKTVLEEKLEKEDFTRGKLMSSLHLKRYYGRILHYLKAKEYSHCAWTIVRVEILRNFYFINRLTGYLRN

SEQ ID NO: 279 - protein, 166 aa, Homo sapiens
  L9A
MSYNLLGFAQRSSNFQCQKLLWQLNGRLEYCLKDRMNFDIPEEIKQLQQFQKEDAALTIYEMLQNIFAIFRQDSSSTGWNETIVENLLANVYHQINHLKTVLEEKLEKEDFTRGKLMSSLHLKRYYGRILHYLKAKEYSHCAWTIVRVEILRNFYFINRLTGYLRN

SEQ ID NO: 280 - protein, 166 aa, Homo sapiens
  R11H
MSYNLLGFLQHSSNFQCQKLLWQLNGRLEYCLKDRMNFDIPEEIKQLQQFQKEDAALTIYEMLQNIFAIFRQDSSSTGWNETIVENLLANVYHQINHLKTVLEEKLEKEDFTRGKLMSSLHLKRYYGRILHYLKAKEYSHCAWTIVRVEILRNFYFINRLTGYLRN

SEQ ID NO: 281 - protein, 166 aa, Homo sapiens
  R11Q
MSYNLLGFLQQSSNFQCQKLLWQLNGRLEYCLKDRMNFDIPEEIKQLQQFQKEDAALTIYEMLQNIFAIFRQDSSSTGWNETIVENLLANVYHQINHLKTVLEEKLEKEDFTRGKLMSSLHLKRYYGRILHYLKAKEYSHCAWTIVRVEILRNFYFINRLTGYLRN

SEQ ID NO: 282 - protein, 166 aa, Homo sapiens
  F15I
MSYNLLGFLQRSSNIQCQKLLWQLNGRLEYCLKDRMNFDIPEEIKQLQQFQKEDAALTIYEMLQNIFAIFRQDSSSTGWNETIVENLLANVYHQINHLKTVLEEKLEKEDFTRGKLMSSLHLKRYYGRILHYLKAKEYSHCAWTIVRVEILRNFYFINRLTGYLRN

SEQ ID NO: 283 - protein, 166 aa, Homo sapiens
  F15V
MSYNLLGFLQRSSNVQCQKLLWQLNGRLEYCLKDRMNFDIPEEIKQLQQFQKEDAALTIYEMLQNIFAIFRQDSSSTGWNETIVENLLANVYHQINHLKTVLEEKLEKEDFTRGKLMSSLHLKRYYGRILHYLKAKEYSHCAWTIVRVEILRNFYFINRLTGYLRN

SEQ ID NO: 284 - protein, 166 aa, Homo sapiens
  K19Q
MSYNLLGFLQRSSNFQCQQLLWQLNGRLEYCLKDRMNFDIPEEIKQLQQFQKEDAALTIYEMLQNIFAIFRQDSSSTGWNETIVENLLANVYHQINHLKTVLEEKLEKEDFTRGKLMSSLHLKRYYGRILHYLKAKEYSHCAWTIVRVEILRNFYFINRLTGYLRN

SEQ ID NO: 285 - protein, 166 aa, Homo sapiens
  K19T
MSYNLLGFLQRSSNFQCQTLLWQLNGRLEYCLKDRMNFDIPEEIKQLQQFQKEDAALTIYEMLQNIFAIFRQDSSSTGWNETIVENLLANVYHQINHLKTVLEEKLEKEDFTRGKLMSSLHLKRYYGRILHYLKAKEYSHCAWTIVRVEILRNFYFINRLTGYLRN

SEQ ID NO: 286 - protein, 166 aa, Homo sapiens
  K19S
MSYNLLGFLQRSSNFQCQSLLWQLNGRLEYCLKDRMNFDIPEEIKQLQQFQKEDAALTIYEMLQNIFAIFRQDSSSTGWNETIVENLLANVYHQINHLKTVLEEKLEKEDFTRGKLMSSLHLKRYYGRILHYLKAKEYSHCAWTIVRVEILRNFYFINRLTGYLRN

SEQ ID NO: 287 - protein, 166 aa, Homo sapiens
  K19H
MSYNLLGFLQRSSNFQCQHLLWQLNGRLEYCLKDRMNFDIPEEIKQLQQFQKEDAALTIYEMLQNIFAIFRQDSSSTGWNETIVENLLANVYHQINHLKTVLEEKLEKEDFTRGKLMSSLHLKRYYGRILHYLKAKEYSHCAWTIVRVEILRNFYFINRLTGYLRN

SEQ ID NO: 288 - protein, 166 aa, Homo sapiens
  W22S
MSYNLLGFLQRSSNFQCQKLLSQLNGRLEYCLKDRMNFDIPEEIKQLQQFQKEDAALTIYEMLQNIFAIFRQDSSSTGWNETIVENLLANVYHQINHLKTVLEEKLEKEDFTRGKLMSSLHLKRYYGRILHYLKAKEYSHCAWTIVRVEILRNFYFINRLTGYLRN

SEQ ID NO: 289 - protein, 166 aa, Homo sapiens
  W22H
MSYNLLGFLQRSSNFQCQKLLHQLNGRLEYCLKDRMNFDIPEEIKQLQQFQKEDAALTIYEMLQNIFAIFRQDSSSTGWNETIVENLLANVYHQINHLKTVLEEKLEKEDFTRGKLMSSLHLKRYYGRILHYLKAKEYSHCAWTIVRVEILRNFYFINRLTGYLRN

SEQ ID NO: 290 - protein, 166 aa, Homo sapiens
  N25H
MSYNLLGFLQRSSNFQCQKLLWQLHGRLEYCLKDRMNFDIPEEIKQLQQFQKEDAALTIYEMLQNIFAIFRQDSSSTGWNETIVENLLANVYHQINHLKTVLEEKLEKEDFTRGKLMSSLHLKRYYGRILHYLKAKEYSHCAWTIVRVEILRNFYFINRLTGYLRN

SEQ ID NO: 291 - protein, 166 aa, Homo sapiens
  N25S
MSYNLLGFLQRSSNFQCQKLLWQLSGRLEYCLKDRMNFDIPEEIKQLQQFQKEDAALTIYEMLQNIFAIFRQDSSSTGWNETIVENLLANVYHQINHLKTVLEEKLEKEDFTRGKLMSSLHLKRYYGRILHYLKAKEYSHCAWTIVRVEILRNFYFINRLTGYLRN

SEQ ID NO: 292 - protein, 166 aa, Homo sapiens
  N25Q
MSYNLLGFLQRSSNFQCQKLLWQLQGRLEYCLKDRMNFDIPEEIKQLQQFQKEDAALTIYEMLQNIFAIFRQDSSSTGWNETIVENLLANVYHQINHLKTVLEEKLEKEDFTRGKLMSSLHLKRYYGRILHYLKAKEYSHCAWTIVRVEILRNFYFINRLTGYLRN

SEQ ID NO: 293 - protein, 166 aa, Homo sapiens
  R27H
MSYNLLGFLQRSSNFQCQKLLWQLNGHLEYCLKDRMNFDIPEEIKQLQQFQKEDAALTIYEMLQNIFAIFRQDSSSTGWNETIVENLLANVYHQINHLKTVLEEKLEKEDFTRGKLMSSLHLKRYYGRILHYLKAKEYSHCAWTIVRVEILRNFYFINRLTGYLRN

SEQ ID NO: 294 - protein, 166 aa, Homo sapiens
  R27Q
MSYNLLGFLQRSSNFQCQKLLWQLNGQLEYCLKDRMNFDIPEEIKQLQQFQKEDAALTIYEMLQNIFAIFRQDSSSTGWNETIVENLLANVYHQINHLKTVLEEKLEKEDFTRGKLMSSLHLKRYYGRILHYLKAKEYSHCAWTIVRVEILRNFYFINRLTGYLRN

SEQ ID NO: 295 - protein, 166 aa, Homo sapiens
  L28V
MSYNLLGFLQRSSNFQCQKLLWQLNGRVEYCLKDRMNFDIPEEIKQLQQFQKEDAALTIYEMLQNIFAIFRQDSSSTGWNETIVENLLANVYHQINHLKTVLEEKLEKEDFTRGKLMSSLHLKRYYGRILHYLKAKEYSHCAWTIVRVEILRNFYFINRLTGYLRN

SEQ ID NO: 296 - protein, 166 aa, Homo sapiens
  L28I
MSYNLLGFLQRSSNFQCQKLLWQLNGRIEYCLKDRMNFDIPEEIKQLQQFQKEDAALTIYEMLQNIFAIFRQDSSSTGWNETIVENLLANVYHQINHLKTVLEEKLEKEDFTRGKLMSSLHLKRYYGRILHYLKAKEYSHCAWTIVRVEILRNFYFINRLTGYLRN

SEQ ID NO: 297 - protein, 166 aa, Homo sapiens
  L28T
MSYNLLGFLQRSSNFQCQKLLWQLNGRTEYCLKDRMNFDIPEEIKQLQQFQKEDAALTIYEMLQNIFAIFRQDSSSTGWNETIVENLLANVYHQINHLKTVLEEKLEKEDFTRGKLMSSLHLKRYYGRILHYLKAKEYSHCAWTIVRVEILRNFYFINRLTGYLRN

SEQ ID NO: 298 - protein, 166 aa, Homo sapiens
  L28Q
MSYNLLGFLQRSSNFQCQKLLWQLNGRQEYCLKDRMNFDIPEEIKQLQQFQKEDAALTIYEMLQNIFAIFRQDSSSTGWNETIVENLLANVYHQINHLKTVLEEKLEKEDFTRGKLMSSLHLKRYYGRILHYLKAKEYSHCAWTIVRVEILRNFYFINRLTGYLRN

SEQ ID NO: 299 - protein, 166 aa, Homo sapiens
  L28H
MSYNLLGFLQRSSNFQCQKLLWQLNGRHEYCLKDRMNFDIPEEIKQLQQFQKEDAALTIYEMLQNIFAIFRQDSSSTGWNETIVENLLANVYHQINHLKTVLEEKLEKEDFTRGKLMSSLHLKRYYGRILHYLKAKEYSHCAWTIVRVEILRNFYFINRLTGYLRN

SEQ ID NO: 300 - protein, 166 aa, Homo sapiens
  L28A
MSYNLLGFLQRSSNFQCQKLLWQLNGRAEYCLKDRMNFDIPEEIKQLQQFQKEDAALTIYEMLQNIFAIFRQDSSSTGWNETIVENLLANVYHQINHLKTVLEEKLEKEDFTRGKLMSSLHLKRYYGRILHYLKAKEYSHCAWTIVRVEILRNFYFINRLTGYLRN

SEQ ID NO: 301 - protein, 166 aa, Homo sapiens
  E29Q
MSYNLLGFLQRSSNFQCQKLLWQLNGRLQYCLKDRMNFDIPEEIKQLQQFQKEDAALTIYEMLQNIFAIFRQDSSSTGWNETIVENLLANVYHQINHLKTVLEEKLEKEDFTRGKLMSSLHLKRYYGRILHYLKAKEYSHCAWTIVRVEILRNFYFINRLTGYLRN

SEQ ID NO: 302 - protein, 166 aa, Homo sapiens
  E29H
MSYNLLGFLQRSSNFQCQKLLWQLNGRLHYCLKDRMNFDIPEEIKQLQQFQKEDAALTIYEMLQNIFAIFRQDSSSTGWNETIVENLLANVYHQINHLKTVLEEKLEKEDFTRGKLMSSLHLKRYYGRILHYLKAKEYSHCAWTIVRVEILRNFYFINRLTGYLRN

SEQ ID NO: 303 - protein, 166 aa, Homo sapiens
  Y30H
MSYNLLGFLQRSSNFQCQKLLWQLNGRLEHCLKDRMNFDIPEEIKQLQQFQKEDAALTIYEMLQNIFAIFRQDSSSTGWNETIVENLLANVYHQINHLKTVLEEKLEKEDFTRGKLMSSLHLKRYYGRILHYLKAKEYSHCAWTIVRVEILRNFYFINRLTGYLRN

SEQ ID NO: 304 - protein, 166 aa, Homo sapiens
  Y30I
MSYNLLGFLQRSSNFQCQKLLWQLNGRLEICLKDRMNFDIPEEIKQLQQFQKEDAALTIYEMLQNIFAIFRQDSSSTGWNETIVENLLANVYHQINHLKTVLEEKLEKEDFTRGKLMSSLHLKRYYGRILHYLKAKEYSHCAWTIVRVEILRNFYFINRLTGYLRN

SEQ ID NO: 305 - protein, 166 aa, Homo sapiens
  L32V
MSYNLLGFLQRSSNFQCQKLLWQLNGRLEYCVKDRMNFDIPEEIKQLQQFQKEDAALTIYEMLQNIFAIFRQDSSSTGWNETIVENLLANVYHQINHLKTVLEEKLEKEDFTRGKLMSSLHLKRYYGRILHYLKAKEYSHCAWTIVRVEILRNFYFINRLTGYLRN

SEQ ID NO: 306 - protein, 166 aa, Homo sapiens
  L32I
MSYNLLGFLQRSSNFQCQKLLWQLNGRLEYCIKDRMNFDIPEEIKQLQQFQKEDAALTIYEMLQNIFAIFRQDSSSTGWNETIVENLLANVYHQINHLKTVLEEKLEKEDFTRGKLMSSLHLKRYYGRILHYLKAKEYSHCAWTIVRVEILRNFYFINRLTGYLRN

SEQ ID NO: 307 - protein, 166 aa, Homo sapiens
  L32T
MSYNLLGFLQRSSNFQCQKLLWQLNGRLEYCTKDRMNFDIPEEIKQLQQFQKEDAALTIYEMLQNIFAIFRQDSSSTGWNETIVENLLANVYHQINHLKTVLEEKLEKEDFTRGKLMSSLHLKRYYGRILHYLKAKEYSHCAWTIVRVEILRNFYFINRLTGYLRN

SEQ ID NO: 308 - protein, 166 aa, Homo sapiens
  L32Q
MSYNLLGFLQRSSNFQCQKLLWQLNGRLEYCQKDRMNFDIPEEIKQLQQFQKEDAALTIYEMLQNIFAIFRQDSSSTGWNETIVENLLANVYHQINHLKTVLEEKLEKEDFTRGKLMSSLHLKRYYGRILHYLKAKEYSHCAWTIVRVEILRNFYFINRLTGYLRN

SEQ ID NO: 309 - protein, 166 aa, Homo sapiens
  L32H
MSYNLLGFLQRSSNFQCQKLLWQLNGRLEYCHKDRMNFDIPEEIKQLQQFQKEDAALTIYEMLQNIFAIFRQDSSSTGWNETIVENLLANVYHQINHLKTVLEEKLEKEDFTRGKLMSSLHLKRYYGRILHYLKAKEYSHCAWTIVRVEILRNFYFINRLTGYLRN

SEQ ID NO: 310 - protein, 166 aa, Homo sapiens
  L32A
MSYNLLGFLQRSSNFQCQKLLWQLNGRLEYCAKDRMNFDIPEEIKQLQQFQKEDAALTIYEMLQNIFAIFRQDSSSTGWNETIVENLLANVYHQINHLKTVLEEKLEKEDFTRGKLMSSLHLKRYYGRILHYLKAKEYSHCAWTIVRVEILRNFYFINRLTGYLRN

SEQ ID NO: 311 - protein, 166 aa, Homo sapiens
  K33Q
MSYNLLGFLQRSSNFQCQKLLWQLNGRLEYCLQDRMNFDIPEEIKQLQQFQKEDAALTIYEMLQNIFAIFRQDSSSTGWNETIVENLLANVYHQINHLKTVLEEKLEKEDFTRGKLMSSLHLKRYYGRILHYLKAKEYSHCAWTIVRVEILRNFYFINRLTGYLRN

SEQ ID NO: 312 - protein, 166 aa, Homo sapiens
  K33T
MSYNLLGFLQRSSNFQCQKLLWQLNGRLEYCLTDRMNFDIPEEIKQLQQFQKEDAALTIYEMLQNIFAIFRQDSSSTGWNETIVENLLANVYHQINHLKTVLEEKLEKEDFTRGKLMSSLHLKRYYGRILHYLKAKEYSHCAWTIVRVEILRNFYFINRLTGYLRN

SEQ ID NO: 313 - protein, 166 aa, Homo sapiens
  K33S
MSYNLLGFLQRSSNFQCQKLLWQLNGRLEYCLSDRMNFDIPEEIKQLQQFQKEDAALTIYEMLQNIFAIFRQDSSSTGWNETIVENLLANVYHQINHLKTVLEEKLEKEDFTRGKLMSSLHLKRYYGRILHYLKAKEYSHCAWTIVRVEILRNFYFINRLTGYLRN

SEQ ID NO: 314 - protein, 166 aa, Homo sapiens
  K33H
MSYNLLGFLQRSSNFQCQKLLWQLNGRLEYCLHDRMNFDIPEEIKQLQQFQKEDAALTIYEMLQNIFAIFRQDSSSTGWNETIVENLLANVYHQINHLKTVLEEKLEKEDFTRGKLMSSLHLKRYYGRILHYLKAKEYSHCAWTIVRVEILRNFYFINRLTGYLRN

SEQ ID NO: 315 - protein, 166 aa, Homo sapiens
  R35H
MSYNLLGFLQRSSNFQCQKLLWQLNGRLEYCLKDHMNFDIPEEIKQLQQFQKEDAALTIYEMLQNIFAIFRQDSSSTGWNETIVENLLANVYHQINHLKTVLEEKLEKEDFTRGKLMSSLHLKRYYGRILHYLKAKEYSHCAWTIVRVEILRNFYFINRLTGYLRN

SEQ ID NO: 316 - protein, 166 aa, Homo sapiens
  R35Q
MSYNLLGFLQRSSNFQCQKLLWQLNGRLEYCLKDQMNFDIPEEIKQLQQFQKEDAALTIYEMLQNIFAIFRQDSSSTGWNETIVENLLANVYHQINHLKTVLEEKLEKEDFTRGKLMSSLHLKRYYGRILHYLKAKEYSHCAWTIVRVEILRNFYFINRLTGYLRN

SEQ ID NO: 317 - protein, 166 aa, Homo sapiens
  M36V
MSYNLLGFLQRSSNFQCQKLLWQLNGRLEYCLKDRVNFDIPEEIKQLQQFQKEDAALTIYEMLQNIFAIFRQDSSSTGWNETIVENLLANVYHQINHLKTVLEEKLEKEDFTRGKLMSSLHLKRYYGRILHYLKAKEYSHCAWTIVRVEILRNFYFINRLTGYLRN

SEQ ID NO: 318 - protein, 166 aa, Homo sapiens
  M36I
MSYNLLGFLQRSSNFQCQKLLWQLNGRLEYCLKDRINFDIPEEIKQLQQFQKEDAALTIYEMLQNIFAIFRQDSSSTGWNETIVENLLANVYHQINHLKTVLEEKLEKEDFTRGKLMSSLHLKRYYGRILHYLKAKEYSHCAWTIVRVEILRNFYFINRLTGYLRN

SEQ ID NO: 319 - protein, 166 aa, Homo sapiens
  M36T
MSYNLLGFLQRSSNFQCQKLLWQLNGRLEYCLKDRTNFDIPEEIKQLQQFQKEDAALTIYEMLQNIFAIFRQDSSSTGWNETIVENLLANVYHQINHLKTVLEEKLEKEDFTRGKLMSSLHLKRYYGRILHYLKAKEYSHCAWTIVRVEILRNFYFINRLTGYLRN

SEQ ID NO: 320 - protein, 166 aa, Homo sapiens
  M36Q
MSYNLLGFLQRSSNFQCQKLLWQLNGRLEYCLKDRQNFDIPEEIKQLQQFQKEDAALTIYEMLQNIFAIFRQDSSSTGWNETIVENLLANVYHQINHLKTVLEEKLEKEDFTRGKLMSSLHLKRYYGRILHYLKAKEYSHCAWTIVRVEILRNFYFINRLTGYLRN

SEQ ID NO: 321 - protein, 166 aa, Homo sapiens
  M36A
MSYNLLGFLQRSSNFQCQKLLWQLNGRLEYCLKDRANFDIPEEIKQLQQFQKEDAALTIYEMLQNIFAIFRQDSSSTGWNETIVENLLANVYHQINHLKTVLEEKLEKEDFTRGKLMSSLHLKRYYGRILHYLKAKEYSHCAWTIVRVEILRNFYFINRLTGYLRN

SEQ ID NO: 322 - protein, 166 aa, Homo sapiens
  M1D
DSYNLLGFLQRSSNFQCQKLLWQLNGRLEYCLKDRMNFDIPEEIKQLQQFQKEDAALTIYEMLQNIFAIFRQDSSSTGWNETIVENLLANVYHQINHLKTVLEEKLEKEDFTRGKLMSSLHLKRYYGRILHYLKAKEYSHCAWTIVRVEILRNFYFINRLTGYLRN

SEQ ID NO: 323 - protein, 166 aa, Homo sapiens
  M1E
ESYNLLGFLQRSSNFQCQKLLWQLNGRLEYCLKDRMNFDIPEEIKQLQQFQKEDAALTIYEMLQNIFAIFRQDSSSTGWNETIVENLLANVYHQINHLKTVLEEKLEKEDFTRGKLMSSLHLKRYYGRILHYLKAKEYSHCAWTIVRVEILRNFYFINRLTGYLRN

SEQ ID NO: 324 - protein, 166 aa, Homo sapiens
  M1K
KSYNLLGFLQRSSNFQCQKLLWQLNGRLEYCLKDRMNFDIPEEIKQLQQFQKEDAALTIYEMLQNIFAIFRQDSSSTGWNETIVENLLANVYHQINHLKTVLEEKLEKEDFTRGKLMSSLHLKRYYGRILHYLKAKEYSHCAWTIVRVEILRNFYFINRLTGYLRN

SEQ ID NO: 325 - protein, 166 aa, Homo sapiens
  M1N
NSYNLLGFLQRSSNFQCQKLLWQLNGRLEYCLKDRMNFDIPEEIKQLQQFQKEDAALTIYEMLQNIFAIFRQDSSSTGWNETIVENLLANVYHQINHLKTVLEEKLEKEDFTRGKLMSSLHLKRYYGRILHYLKAKEYSHCAWTIVRVEILRNFYFINRLTGYLRN

SEQ ID NO: 326 - protein, 166 aa, Homo sapiens
  M1R
RSYNLLGFLQRSSNFQCQKLLWQLNGRLEYCLKDRMNFDIPEEIKQLQQFQKEDAALTIYEMLQNIFAIFRQDSSSTGWNETIVENLLANVYHQINHLKTVLEEKLEKEDFTRGKLMSSLHLKRYYGRILHYLKAKEYSHCAWTIVRVEILRNFYFINRLTGYLRN

SEQ ID NO: 327 - protein, 166 aa, Homo sapiens
  M1S
SSYNLLGFLQRSSNFQCQKLLWQLNGRLEYCLKDRMNFDIPEEIKQLQQFQKEDAALTIYEMLQNIFAIFRQDSSSTGWNETIVENLLANVYHQINHLKTVLEEKLEKEDFTRGKLMSSLHLKRYYGRILHYLKAKEYSHCAWTIVRVEILRNFYFINRLTGYLRN

SEQ ID NO: 328 - protein, 166 aa, Homo sapiens
  L5D
MSYNDLGFLQRSSNFQCQKLLWQLNGRLEYCLKDRMNFDIPEEIKQLQQFQKEDAALTIYEMLQNIFAIFRQDSSSTGWNETIVENLLANVYHQINHLKTVLEEKLEKEDFTRGKLMSSLHLKRYYGRILHYLKAKEYSHCAWTIVRVEILRNFYFINRLTGYLRN

SEQ ID NO: 329 - protein, 166 aa, Homo sapiens
  L5E
MSYNELGFLQRSSNFQCQKLLWQLNGRLEYCLKDRMNFDIPEEIKQLQQFQKEDAALTIYEMLQNIFAIFRQDSSSTGWNETIVENLLANVYHQINHLKTVLEEKLEKEDFTRGKLMSSLHLKRYYGRILHYLKAKEYSHCAWTIVRVEILRNFYFINRLTGYLRN

SEQ ID NO: 330 - protein, 166 aa, Homo sapiens
  L5K
MSYNKLGFLQRSSNFQCQKLLWQLNGRLEYCLKDRMNFDIPEEIKQLQQFQKEDAALTIYEMLQNIFAIFRQDSSSTGWNETIVENLLANVYHQINHLKTVLEEKLEKEDFTRGKLMSSLHLKRYYGRILHYLKAKEYSHCAWTIVRVEILRNFYFINRLTGYLRN

SEQ ID NO: 331 - protein, 166 aa, Homo sapiens
  L5R
MSYNRLGFLQRSSNFQCQKLLWQLNGRLEYCLKDRMNFDIPEEIKQLQQFQKEDAALTIYEMLQNIFAIFRQDSSSTGWNETIVENLLANVYHQINHLKTVLEEKLEKEDFTRGKLMSSLHLKRYYGRILHYLKAKEYSHCAWTIVRVEILRNFYFINRLTGYLRN

SEQ ID NO: 332 - protein, 166 aa, Homo sapiens
  L5N
MSYNNLGFLQRSSNFQCQKLLWQLNGRLEYCLKDRMNFDIPEEIKQLQQFQKEDAALTIYEMLQNIFAIFRQDSSSTGWNETIVENLLANVYHQINHLKTVLEEKLEKEDFTRGKLMSSLHLKRYYGRILHYLKAKEYSHCAWTIVRVEILRNFYFINRLTGYLRN

SEQ ID NO: 333 - protein, 166 aa, Homo sapiens
  L5S
MSYNSLGFLQRSSNFQCQKLLWQLNGRLEYCLKDRMNFDIPEEIKQLQQFQKEDAALTIYEMLQNIFAIFRQDSSSTGWNETIVENLLANVYHQINHLKTVLEEKLEKEDFTRGKLMSSLHLKRYYGRILHYLKAKEYSHCAWTIVRVEILRNFYFINRLTGYLRN

SEQ ID NO: 334 - protein, 166 aa, Homo sapiens
  L6D
MSYNLDGFLQRSSNFQCQKLLWQLNGRLEYCLKDRMNFDIPEEIKQLQQFQKEDAALTIYEMLQNIFAIFRQDSSSTGWNETIVENLLANVYHQINHLKTVLEEKLEKEDFTRGKLMSSLHLKRYYGRILHYLKAKEYSHCAWTIVRVEILRNFYFINRLTGYLRN

SEQ ID NO: 335 - protein, 166 aa, Homo sapiens
  L6E
MSYNLEGFLQRSSNFQCQKLLWQLNGRLEYCLKDRMNFDIPEEIKQLQQFQKEDAALTIYEMLQNIFAIFRQDSSSTGWNETIVENLLANVYHQINHLKTVLEEKLEKEDFTRGKLMSSLHLKRYYGRILHYLKAKEYSHCAWTIVRVEILRNFYFINRLTGYLRN

SEQ ID NO: 336 - protein, 166 aa, Homo sapiens
  L6K
MSYNLKGFLQRSSNFQCQKLLWQLNGRLEYCLKDRMNFDIPEEIKQLQQFQKEDAALTIYEMLQNIFAIFRQDSSSTGWNETIVENLLANVYHQINHLKTVLEEKLEKEDFTRGKLMSSLHLKRYYGRILHYLKAKEYSHCAWTIVRVEILRNFYFINRLTGYLRN

SEQ ID NO: 337 - protein, 166 aa, Homo sapiens
  L6N
MSYNLNGFLQRSSNFQCQKLLWQLNGRLEYCLKDRMNFDIPEEIKQLQQFQKEDAALTIYEMLQNIFAIFRQDSSSTGWNETIVENLLANVYHQINHLKTVLEEKLEKEDFTRGKLMSSLHLKRYYGRILHYLKAKEYSHCAWTIVRVEILRNFYFINRLTGYLRN

SEQ ID NO: 338 - protein, 166 aa, Homo sapiens
  L6Q
MSYNLQGFLQRSSNFQCQKLLWQLNGRLEYCLKDRMNFDIPEEIKQLQQFQKEDAALTIYEMLQNIFAIFRQDSSSTGWNETIVENLLANVYHQINHLKTVLEEKLEKEDFTRGKLMSSLHLKRYYGRILHYLKAKEYSHCAWTIVRVEILRNFYFINRLTGYLRN

SEQ ID NO: 339 - protein, 166 aa, Homo sapiens
  L6R
MSYNLRGFLQRSSNFQCQKLLWQLNGRLEYCLKDRMNFDIPEEIKQLQQFQKEDAALTIYEMLQNIFAIFRQDSSSTGWNETIVENLLANVYHQINHLKTVLEEKLEKEDFTRGKLMSSLHLKRYYGRILHYLKAKEYSHCAWTIVRVEILRNFYFINRLTGYLRN

SEQ ID NO: 340 - protein, 166 aa, Homo sapiens
  L6S
MSYNLSGFLQRSSNFQCQKLLWQLNGRLEYCLKDRMNFDIPEEIKQLQQFQKEDAALTIYEMLQNIFAIFRQDSSSTGWNETIVENLLANVYHQINHLKTVLEEKLEKEDFTRGKLMSSLHLKRYYGRILHYLKAKEYSHCAWTIVRVEILRNFYFINRLTGYLRN

SEQ ID NO: 341 - protein, 166 aa, Homo sapiens
  L6T
MSYNLTGFLQRSSNFQCQKLLWQLNGRLEYCLKDRMNFDIPEEIKQLQQFQKEDAALTIYEMLQNIFAIFRQDSSSTGWNETIVENLLANVYHQINHLKTVLEEKLEKEDFTRGKLMSSLHLKRYYGRILHYLKAKEYSHCAWTIVRVEILRNFYFINRLTGYLRN

SEQ ID NO: 342 - protein, 166 aa, Homo sapiens
  F8D
MSYNLLGDLQRSSNFQCQKLLWQLNGRLEYCLKDRMNFDIPEEIKQLQQFQKEDAALTIYEMLQNIFAIFRQDSSSTGWNETIVENLLANVYHQINHLKTVLEEKLEKEDFTRGKLMSSLHLKRYYGRILHYLKAKEYSHCAWTIVRVEILRNFYFINRLTGYLRN

SEQ ID NO: 343 - protein, 166 aa, Homo sapiens
  F8E
MSYNLLGELQRSSNFQCQKLLWQLNGRLEYCLKDRMNFDIPEEIKQLQQFQKEDAALTIYEMLQNIFAIFRQDSSSTGWNETIVENLLANVYHQINHLKTVLEEKLEKEDFTRGKLMSSLHLKRYYGRILHYLKAKEYSHCAWTIVRVEILRNFYFINRLTGYLRN

SEQ ID NO: 344 - protein, 166 aa, Homo sapiens
  F8K
MSYNLLGKLQRSSNFQCQKLLWQLNGRLEYCLKDRMNFDIPEEIKQLQQFQKEDAALTIYEMLQNIFAIFRQDSSSTGWNETIVENLLANVYHQINHLKTVLEEKLEKEDFTRGKLMSSLHLKRYYGRILHYLKAKEYSHCAWTIVRVEILRNFYFINRLTGYLRN

SEQ ID NO: 345 - protein, 166 aa, Homo sapiens
  F8R
MSYNLLGRLQRSSNFQCQKLLWQLNGRLEYCLKDRMNFDIPEEIKQLQQFQKEDAALTIYEMLQNIFAIFRQDSSSTGWNETIVENLLANVYHQINHLKTVLEEKLEKEDFTRGKLMSSLHLKRYYGRILHYLKAKEYSHCAWTIVRVEILRNFYFINRLTGYLRN

SEQ ID NO: 346 - protein, 166 aa, Homo sapiens
  L9D
MSYNLLGFDQRSSNFQCQKLLWQLNGRLEYCLKDRMNFDIPEEIKQLQQFQKEDAALTIYEMLQNIFAIFRQDSSSTGWNETIVENLLANVYHQINHLKTVLEEKLEKEDFTRGKLMSSLHLKRYYGRILHYLKAKEYSHCAWTIVRVEILRNFYFINRLTGYLRN

SEQ ID NO: 347 - protein, 166 aa, Homo sapiens
  L9E
MSYNLLGFEQRSSNFQCQKLLWQLNGRLEYCLKDRMNFDIPEEIKQLQQFQKEDAALTIYEMLQNIFAIFRQDSSSTGWNETIVENLLANVYHQINHLKTVLEEKLEKEDFTRGKLMSSLHLKRYYGRILHYLKAKEYSHCAWTIVRVEILRNFYFINRLTGYLRN

SEQ ID NO: 348 - protein, 166 aa, Homo sapiens
  L9K
MSYNLLGFKQRSSNFQCQKLLWQLNGRLEYCLKDRMNFDIPEEIKQLQQFQKEDAALTIYEMLQNIFAIFRQDSSSTGWNETIVENLLANVYHQINHLKTVLEEKLEKEDFTRGKLMSSLHLKRYYGRILHYLKAKEYSHCAWTIVRVEILRNFYFINRLTGYLRN

SEQ ID NO: 349 - protein, 166 aa, Homo sapiens
  L9N
MSYNLLGFNQRSSNFQCQKLLWQLNGRLEYCLKDRMNFDIPEEIKQLQQFQKEDAALTIYEMLQNIFAIFRQDSSSTGWNETIVENLLANVYHQINHLKTVLEEKLEKEDFTRGKLMSSLHLKRYYGRILHYLKAKEYSHCAWTIVRVEILRNFYFINRLTGYLRN

SEQ ID NO: 350 - protein, 166 aa, Homo sapiens
  L9R
MSYNLLGFRQRSSNFQCQKLLWQLNGRLEYCLKDRMNFDIPEEIKQLQQFQKEDAALTIYEMLQNIFAIFRQDSSSTGWNETIVENLLANVYHQINHLKTVLEEKLEKEDFTRGKLMSSLHLKRYYGRILHYLKAKEYSHCAWTIVRVEILRNFYFINRLTGYLRN

SEQ ID NO: 351 - protein, 166 aa, Homo sapiens
  L9S
MSYNLLGFSQRSSNFQCQKLLWQLNGRLEYCLKDRMNFDIPEEIKQLQQFQKEDAALTIYEMLQNIFAIFRQDSSSTGWNETIVENLLANVYHQINHLKTVLEEKLEKEDFTRGKLMSSLHLKRYYGRILHYLKAKEYSHCAWTIVRVEILRNFYFINRLTGYLRN

SEQ ID NO: 352 - protein, 166 aa, Homo sapiens
  Q10D
MSYNLLGFLDRSSNFQCQKLLWQLNGRLEYCLKDRMNFDIPEEIKQLQQFQKEDAALTIYEMLQNIFAIFRQDSSSTGWNETIVENLLANVYHQINHLKTVLEEKLEKEDFTRGKLMSSLHLKRYYGRILHYLKAKEYSHCAWTIVRVEILRNFYFINRLTGYLRN

SEQ ID NO: 353 - protein, 166 aa, Homo sapiens
  Q10E
MSYNLLGFLERSSNFQCQKLLWQLNGRLEYCLKDRMNFDIPEEIKQLQQFQKEDAALTIYEMLQNIFAIFRQDSSSTGWNETIVENLLANVYHQINHLKTVLEEKLEKEDFTRGKLMSSLHLKRYYGRILHYLKAKEYSHCAWTIVRVEILRNFYFINRLTGYLRN

SEQ ID NO: 354 - protein, 166 aa, Homo sapiens
  Q10K
MSYNLLGFLKRSSNFQCQKLLWQLNGRLEYCLKDRMNFDIPEEIKQLQQFQKEDAALTIYEMLQNIFAIFRQDSSSTGWNETIVENLLANVYHQINHLKTVLEEKLEKEDFTRGKLMSSLHLKRYYGRILHYLKAKEYSHCAWTIVRVEILRNFYFINRLTGYLRN

SEQ ID NO: 355 - protein, 166 aa, Homo sapiens
  Q10N
MSYNLLGFLNRSSNFQCQKLLWQLNGRLEYCLKDRMNFDIPEEIKQLQQFQKEDAALTIYEMLQNIFAIFRQDSSSTGWNETIVENLLANVYHQINHLKTVLEEKLEKEDFTRGKLMSSLHLKRYYGRILHYLKAKEYSHCAWTIVRVEILRNFYFINRLTGYLRN

SEQ ID NO: 356 - protein, 166 aa, Homo sapiens
  Q10R
MSYNLLGFLRRSSNFQCQKLLWQLNGRLEYCLKDRMNFDIPEEIKQLQQFQKEDAALTIYEMLQNIFAIFRQDSSSTGWNETIVENLLANVYHQINHLKTVLEEKLEKEDFTRGKLMSSLHLKRYYGRILHYLKAKEYSHCAWTIVRVEILRNFYFINRLTGYLRN

SEQ ID NO: 357 - protein, 166 aa, Homo sapiens
  Q10S
MSYNLLGFLSRSSNFQCQKLLWQLNGRLEYCLKDRMNFDIPEEIKQLQQFQKEDAALTIYEMLQNIFAIFRQDSSSTGWNETIVENLLANVYHQINHLKTVLEEKLEKEDFTRGKLMSSLHLKRYYGRILHYLKAKEYSHCAWTIVRVEILRNFYFINRLTGYLRN

SEQ ID NO: 358 - protein, 166 aa, Homo sapiens
  Q10T
MSYNLLGFLTRSSNFQCQKLLWQLNGRLEYCLKDRMNFDIPEEIKQLQQFQKEDAALTIYEMLQNIFAIFRQDSSSTGWNETIVENLLANVYHQINHLKTVLEEKLEKEDFTRGKLMSSLHLKRYYGRILHYLKAKEYSHCAWTIVRVEILRNFYFINRLTGYLRN

SEQ ID NO: 359 - protein, 166 aa, Homo sapiens
  S12D
MSYNLLGFLQRDSNFQCQKLLWQLNGRLEYCLKDRMNFDIPEEIKQLQQFQKEDAALTIYEMLQNIFAIFRQDSSSTGWNETIVENLLANVYHQINHLKTVLEEKLEKEDFTRGKLMSSLHLKRYYGRILHYLKAKEYSHCAWTIVRVEILRNFYFINRLTGYLRN

SEQ ID NO: 360 - protein, 166 aa, Homo sapiens
  S12E
MSYNLLGFLQRESNFQCQKLLWQLNGRLEYCLKDRMNFDIPEEIKQLQQFQKEDAALTIYEMLQNIFAIFRQDSSSTGWNETIVENLLANVYHQINHLKTVLEEKLEKEDFTRGKLMSSLHLKRYYGRILHYLKAKEYSHCAWTIVRVEILRNFYFINRLTGYLRN

SEQ ID NO: 361 - protein, 166 aa, Homo sapiens
  S12K
MSYNLLGFLQRKSNFQCQKLLWQLNGRLEYCLKDRMNFDIPEEIKQLQQFQKEDAALTIYEMLQNIFAIFRQDSSSTGWNETIVENLLANVYHQINHLKTVLEEKLEKEDFTRGKLMSSLHLKRYYGRILHYLKAKEYSHCAWTIVRVEILRNFYFINRLTGYLRN

SEQ ID NO: 362 - protein, 166 aa, Homo sapiens
  S12R
MSYNLLGFLQRRSNFQCQKLLWQLNGRLEYCLKDRMNFDIPEEIKQLQQFQKEDAALTIYEMLQNIFAIFRQDSSSTGWNETIVENLLANVYHQINHLKTVLEEKLEKEDFTRGKLMSSLHLKRYYGRILHYLKAKEYSHCAWTIVRVEILRNFYFINRLTGYLRN

SEQ ID NO: 363 - protein, 166 aa, Homo sapiens
  S13D
MSYNLLGFLQRSDNFQCQKLLWQLNGRLEYCLKDRMNFDIPEEIKQLQQFQKEDAALTIYEMLQNIFAIFRQDSSSTGWNETIVENLLANVYHQINHLKTVLEEKLEKEDFTRGKLMSSLHLKRYYGRILHYLKAKEYSHCAWTIVRVEILRNFYFINRLTGYLRN

SEQ ID NO: 364 - protein, 166 aa, Homo sapiens
  S13E
MSYNLLGFLQRSENFQCQKLLWQLNGRLEYCLKDRMNFDIPEEIKQLQQFQKEDAALTIYEMLQNIFAIFRQDSSSTGWNETIVENLLANVYHQINHLKTVLEEKLEKEDFTRGKLMSSLHLKRYYGRILHYLKAKEYSHCAWTIVRVEILRNFYFINRLTGYLRN

SEQ ID NO: 365 - protein, 166 aa, Homo sapiens
  S13K
MSYNLLGFLQRSKNFQCQKLLWQLNGRLEYCLKDRMNFDIPEEIKQLQQFQKEDAALTIYEMLQNIFAIFRQDSSSTGWNETIVENLLANVYHQINHLKTVLEEKLEKEDFTRGKLMSSLHLKRYYGRILHYLKAKEYSHCAWTIVRVEILRNFYFINRLTGYLRN

SEQ ID NO: 366 - protein, 166 aa, Homo sapiens
  S13N
MSYNLLGFLQRSNNFQCQKLLWQLNGRLEYCLKDRMNFDIPEEIKQLQQFQKEDAALTIYEMLQNIFAIFRQDSSSTGWNETIVENLLANVYHQINHLKTVLEEKLEKEDFTRGKLMSSLHLKRYYGRILHYLKAKEYSHCAWTIVRVEILRNFYFINRLTGYLRN

SEQ ID NO: 367 - protein, 166 aa, Homo sapiens
  S13Q
MSYNLLGFLQRSQNFQCQKLLWQLNGRLEYCLKDRMNFDIPEEIKQLQQFQKEDAALTIYEMLQNIFAIFRQDSSSTGWNETIVENLLANVYHQINHLKTVLEEKLEKEDFTRGKLMSSLHLKRYYGRILHYLKAKEYSHCAWTIVRVEILRNFYFINRLTGYLRN

SEQ ID NO: 368 - protein, 166 aa, Homo sapiens [sequence omitted]

SEQ ID NO: 369 - protein, 166 aa, Homo sapiens
  S13T
MSYNLLGFLQRSTNFQCQKLLWQLNGRLEYCLKDRMNFDIPEEIKQLQQFQKEDAALTIYEMLQNIFAIFRQDSSSTGWNETIVENLLANVYHQINHLKTVLEEKLEKEDFTRGKLMSSLHLKRYYGRILHYLKAKEYSHCAWTIVRVEILRNFYFINRLTGYLRN

SEQ ID NO: 370 - protein, 166 aa, Homo sapiens
  N14D
MSYNLLGFLQRSSDFQCQKLLWQLNGRLEYCLKDRMNFDIPEEIKQLQQFQKEDAALTIYEMLQNIFAIFRQDSSSTGWNETIVENLLANVYHQINHLKTVLEEKLEKEDFTRGKLMSSLHLKRYYGRILHYLKAKEYSHCAWTIVRVEILRNFYFINRLTGYLRN

SEQ ID NO: 371 - protein, 166 aa, Homo sapiens
  N14E
MSYNLLGFLQRSSEFQCQKLLWQLNGRLEYCLKDRMNFDIPEEIKQLQQFQKEDAALTIYEMLQNIFAIFRQDSSSTGWNETIVENLLANVYHQINHLKTVLEEKLEKEDFTRGKLMSSLHLKRYYGRILHYLKAKEYSHCAWTIVRVEILRNFYFINRLTGYLRN

SEQ ID NO: 372 - protein, 166 aa, Homo sapiens
  N14K
MSYNLLGFLQRSSKFQCQKLLWQLNGRLEYCLKDRMNFDIPEEIKQLQQFQKEDAALTIYEMLQNIFAIFRQDSSSTGWNETIVENLLANVYHQINHLKTVLEEKLEKEDFTRGKLMSSLHLKRYYGRILHYLKAKEYSHCAWTIVRVEILRNFYFINRLTGYLRN

SEQ ID NO: 373 - protein, 166 aa, Homo sapiens
  N14Q
MSYNLLGFLQRSSQFQCQKLLWQLNGRLEYCLKDRMNFDIPEEIKQLQQFQKEDAALTIYEMLQNIFAIFRQDSSSTGWNETIVENLLANVYHQINHLKTVLEEKLEKEDFTRGKLMSSLHLKRYYGRILHYLKAKEYSHCAWTIVRVEILRNFYFINRLTGYLRN

SEQ ID NO: 374 - protein, 166 aa, Homo sapiens
  N14R
MSYNLLGFLQRSSRFQCQKLLWQLNGRLEYCLKDRMNFDIPEEIKQLQQFQKEDAALTIYEMLQNIFAIFRQDSSSTGWNETIVENLLANVYHQINHLKTVLEEKLEKEDFTRGKLMSSLHLKRYYGRILHYLKAKEYSHCAWTIVRVEILRNFYFINRLTGYLRN

SEQ ID NO: 375 - protein, 166 aa, Homo sapiens
  N14S
MSYNLLGFLQRSSSFQCQKLLWQLNGRLEYCLKDRMNFDIPEEIKQLQQFQKEDAALTIYEMLQNIFAIFRQDSSSTGWNETIVENLLANVYHQINHLKTVLEEKLEKEDFTRGKLMSSLHLKRYYGRILHYLKAKEYSHCAWTIVRVEILRNFYFINRLTGYLRN

SEQ ID NO: 376 - protein, 166 aa, Homo sapiens
  N14T
MSYNLLGFLQRSSTFQCQKLLWQLNGRLEYCLKDRMNFDIPEEIKQLQQFQKEDAALTIYEMLQNIFAIFRQDSSSTGWNETIVENLLANVYHQINHLKTVLEEKLEKEDFTRGKLMSSLHLKRYYGRILHYLKAKEYSHCAWTIVRVEILRNFYFINRLTGYLRN

SEQ ID NO: 377 - protein, 166 aa, Homo sapiens
  F15D
MSYNLLGFLQRSSNDQCQKLLWQLNGRLEYCLKDRMNFDIPEEIKQLQQFQKEDAALTIYEMLQNIFAIFRQDSSSTGWNETIVENLLANVYHQINHLKTVLEEKLEKEDFTRGKLMSSLHLKRYYGRILHYLKAKEYSHCAWTIVRVEILRNFYFINRLTGYLRN

SEQ ID NO: 378 - protein, 166 aa, Homo sapiens
  F15E
MSYNLLGFLQRSSNEQCQKLLWQLNGRLEYCLKDRMNFDIPEEIKQLQQFQKEDAALTIYEMLQNIFAIFRQDSSSTGWNETIVENLLANVYHQINHLKTVLEEKLEKEDFTRGKLMSSLHLKRYYGRILHYLKAKEYSHCAWTIVRVEILRNFYFINRLTGYLRN

SEQ ID NO: 379 - protein, 166 aa, Homo sapiens
  F15K
MSYNLLGFLQRSSNKQCQKLLWQLNGRLEYCLKDRMNFDIPEEIKQLQQFQKEDAALTIYEMLQNIFAIFRQDSSSTGWNETIVENLLANVYHQINHLKTVLEEKLEKEDFTRGKLMSSLHLKRYYGRILHYLKAKEYSHCAWTIVRVEILRNFYFINRLTGYLRN

SEQ ID NO: 380 - protein, 166 aa, Homo sapiens
  F15R
MSYNLLGFLQRSSNRQCQKLLWQLNGRLEYCLKDRMNFDIPEEIKQLQQFQKEDAALTIYEMLQNIFAIFRQDSSSTGWNETIVENLLANVYHQINHLKTVLEEKLEKEDFTRGKLMSSLHLKRYYGRILHYLKAKEYSHCAWTIVRVEILRNFYFINRLTGYLRN

SEQ ID NO: 381 - protein, 166 aa, Homo sapiens
  Q16D
MSYNLLGFLQRSSNFDCQKLLWQLNGRLEYCLKDRMNFDIPEEIKQLQQFQKEDAALTIYEMLQNIFAIFRQDSSSTGWNETIVENLLANVYHQINHLKTVLEEKLEKEDFTRGKLMSSLHLKRYYGRILHYLKAKEYSHCAWTIVRVEILRNFYFINRLTGYLRN

SEQ ID NO: 382 - protein, 166 aa, Homo sapiens
  Q16E
MSYNLLGFLQRSSNFECQKLLWQLNGRLEYCLKDRMNFDIPEEIKQLQQFQKEDAALTIYEMLQNIFAIFRQDSSSTGWNETIVENLLANVYHQINHLKTVLEEKLEKEDFTRGKLMSSLHLKRYYGRILHYLKAKEYSHCAWTIVRVEILRNFYFINRLTGYLRN

SEQ ID NO: 383 - protein, 166 aa, Homo sapiens
  Q16K
MSYNLLGFLQRSSNFKCQKLLWQLNGRLEYCLKDRMNFDIPEEIKQLQQFQKEDAALTIYEMLQNIFAIFRQDSSSTGWNETIVENLLANVYHQINHLKTVLEEKLEKEDFTRGKLMSSLHLKRYYGRILHYLKAKEYSHCAWTIVRVEILRNFYFINRLTGYLRN

SEQ ID NO: 384 - protein, 166 aa, Homo sapiens
  Q16N
MSYNLLGFLQRSSNFNCQKLLWQLNGRLEYCLKDRMNFDIPEEIKQLQQFQKEDAALTIYEMLQNIFAIFRQDSSSTGWNETIVENLLANVYHQINHLKTVLEEKLEKEDFTRGKLMSSLHLKRYYGRILHYLKAKEYSHCAWTIVRVEILRNFYFINRLTGYLRN

SEQ ID NO: 385 - protein, 166 aa, Homo sapiens
  Q16R
MSYNLLGFLQRSSNFRCQKLLWQLNGRLEYCLKDRMNFDIPEEIKQLQQFQKEDAALTIYEMLQNIFAIFRQDSSSTGWNETIVENLLANVYHQINHLKTVLEEKLEKEDFTRGKLMSSLHLKRYYGRILHYLKAKEYSHCAWTIVRVEILRNFYFINRLTGYLRN

SEQ ID NO: 386 - protein, 166 aa, Homo sapiens
  Q16S
MSYNLLGFLQRSSNFSCQKLLWQLNGRLEYCLKDRMNFDIPEEIKQLQQFQKEDAALTIYEMLQNIFAIFRQDSSSTGWNETIVENLLANVYHQINHLKTVLEEKLEKEDFTRGKLMSSLHLKRYYGRILHYLKAKEYSHCAWTIVRVEILRNFYFINRLTGYLRN

SEQ ID NO: 387 - protein, 166 aa, Homo sapiens
  Q16T
MSYNLLGFLQRSSNFTCQKLLWQLNGRLEYCLKDRMNFDIPEEIKQLQQFQKEDAALTIYEMLQNIFAIFRQDSSSTGWNETIVENLLANVYHQINHLKTVLEEKLEKEDFTRGKLMSSLHLKRYYGRILHYLKAKEYSHCAWTIVRVEILRNFYFINRLTGYLRN

SEQ ID NO: 388 - protein, 166 aa, Homo sapiens
  C17D
MSYNLLGFLQRSSNFQDQKLLWQLNGRLEYCLKDRMNFDIPEEIKQLQQFQKEDAALTIYEMLQNIFAIFRQDSSSTGWNETIVENLLANVYHQINHLKTVLEEKLEKEDFTRGKLMSSLHLKRYYGRILHYLKAKEYSHCAWTIVRVEILRNFYFINRLTGYLRN

SEQ ID NO: 389 - protein, 166 aa, Homo sapiens
  C17D
MSYNLLGFLQRSSNFQEQKLLWQLNGRLEYCLKDRMNFDIPEEIKQLQQFQKEDAALTIYEMLQNIFAIFRQDSSSTGWNETIVENLLANVYHQINHLKTVLEEKLEKEDFTRGKLMSSLHLKRYYGRILHYLKAKEYSHCAWTIVRVEILRNFYFINRLTGYLRN

SEQ ID NO: 390 - protein, 166 aa, Homo sapiens
  C17K
MSYNLLGFLQRSSNFQKQKLLWQLNGRLEYCLKDRMNFDIPEEIKQLQQFQKEDAALTIYEMLQNIFAIFRQDSSSTGWNETIVENLLANVYHQINHLKTVLEEKLEKEDFTRGKLMSSLHLKRYYGRILHYLKAKEYSHCAWTIVRVEILRNFYFINRLTGYLRN

SEQ ID NO: 391 - protein, 166 aa, Homo sapiens
  C17N
MSYNLLGFLQRSSNFQNQKLLWQLNGRLEYCLKDRMNFDIPEEIKQLQQFQKEDAALTIYEMLQNIFAIFRQDSSSTGWNETIVENLLANVYHQINHLKTVLEEKLEKEDFTRGKLMSSLHLKRYYGRILHYLKAKEYSHCAWTIVRVEILRNFYFINRLTGYLRN

SEQ ID NO: 392 - protein, 166 aa, Homo sapiens
  C17Q
MSYNLLGFLQRSSNFQQQKLLWQLNGRLEYCLKDRMNFDIPEEIKQLQQFQKEDAALTIYEMLQNIFAIFRQDSSSTGWNETIVENLLANVYHQINHLKTVLEEKLEKEDFTRGKLMSSLHLKRYYGRILHYLKAKEYSHCAWTIVRVEILRNFYFINRLTGYLRN

SEQ ID NO: 393 - protein, 166 aa, Homo sapiens
  C17R
MSYNLLGFLQRSSNFQRQKLLWQLNGRLEYCLKDRMNFDIPEEIKQLQQFQKEDAALTIYEMLQNIFAIFRQDSSSTGWNETIVENLLANVYHQINHLKTVLEEKLEKEDFTRGKLMSSLHLKRYYGRILHYLKAKEYSHCAWTIVRVEILRNFYFINRLTGYLRN

SEQ ID NO: 394 - protein, 166 aa, Homo sapiens
  C17S
MSYNLLGFLQRSSNFQSQKLLWQLNGRLEYCLKDRMNFDIPEEIKQLQQFQKEDAALTIYEMLQNIFAIFRQDSSSTGWNETIVENLLANVYHQINHLKTVLEEKLEKEDFTRGKLMSSLHLKRYYGRILHYLKAKEYSHCAWTIVRVEILRNFYFINRLTGYLRN

SEQ ID NO: 395 - protein, 166 aa, Homo sapiens
  C17T
MSYNLLGFLQRSSNFQTQKLLWQLNGRLEYCLKDRMNFDIPEEIKQLQQFQKEDAALTIYEMLQNIFAIFRQDSSSTGWNETIVENLLANVYHQINHLKTVLEEKLEKEDFTRGKLMSSLHLKRYYGRILHYLKAKEYSHCAWTIVRVEILRNFYFINRLTGYLRN

SEQ ID NO: 396 - protein, 166 aa, Homo sapiens
  L20N
MSYNLLGFLQRSSNFQCQKNLWQLNGRLEYCLKDRMNFDIPEEIKQLQQFQKEDAALTIYEMLQNIFAIFRQDSSSTGWNETIVENLLANVYHQINHLKTVLEEKLEKEDFTRGKLMSSLHLKRYYGRILHYLKAKEYSHCAWTIVRVEILRNFYFINRLTGYLRN

SEQ ID NO: 397 - protein, 166 aa, Homo sapiens
  L20E
MSYNLLGFLQRSSNFQCQKQLWQLNGRLEYCLKDRMNFDIPEEIKQLQQFQKEDAALTIYEMLQNIFAIFRQDSSSTGWNETIVENLLANVYHQINHLKTVLEEKLEKEDFTRGKLMSSLHLKRYYGRILHYLKAKEYSHCAWTIVRVEILRNFYFINRLTGYLRN

SEQ ID NO: 398 - protein, 166 aa, Homo sapiens
  L20R
MSYNLLGFLQRSSNFQCQKRLWQLNGRLEYCLKDRMNFDIPEEIKQLQQFQKEDAALTIYEMLQNIFAIFRQDSSSTGWNETIVENLLANVYHQINHLKTVLEEKLEKEDFTRGKLMSSLHLKRYYGRILHYLKAKEYSHCAWTIVRVEILRNFYFINRLTGYLRN

SEQ ID NO: 399 - protein, 166 aa, Homo sapiens
  L20S
MSYNLLGFLQRSSNFQCQKSLWQLNGRLEYCLKDRMNFDIPEEIKQLQQFQKEDAALTIYEMLQNIFAIFRQDSSSTGWNETIVENLLANVYHQINHLKTVLEEKLEKEDFTRGKLMSSLHLKRYYGRILHYLKAKEYSHCAWTIVRVEILRNFYFINRLTGYLRN

SEQ ID NO: 400 - protein, 166 aa, Homo sapiens
  L20T
MSYNLLGFLQRSSNFQCQKTLWQLNGRLEYCLKDRMNFDIPEEIKQLQQFQKEDAALTIYEMLQNIFAIFRQDSSSTGWNETIVENLLANVYHQINHLKTVLEEKLEKEDFTRGKLMSSLHLKRYYGRILHYLKAKEYSHCAWTIVRVEILRNFYFINRLTGYLRN

SEQ ID NO: 401 - protein, 166 aa, Homo sapiens
  L20D
MSYNLLGFLQRSSNFQCQKDLWQLNGRLEYCLKDRMNFDIPEEIKQLQQFQKEDAALTIYEMLQNIFAIFRQDSSSTGWNETIVENLLANVYHQINHLKTVLEEKLEKEDFTRGKLMSSLHLKRYYGRILHYLKAKEYSHCAWTIVRVEILRNFYFINRLTGYLRN

SEQ ID NO: 402 - protein, 166 aa, Homo sapiens
  L20Q
MSYNLLGFLQRSSNFQCQKELWQLNGRLEYCLKDRMNFDIPEEIKQLQQFQKEDAALTIYEMLQNIFAIFRQDSSSTGWNETIVENLLANVYHQINHLKTVLEEKLEKEDFTRGKLMSSLHLKRYYGRILHYLKAKEYSHCAWTIVRVEILRNFYFINRLTGYLRN

SEQ ID NO: 403 - protein, 166 aa, Homo sapiens
  L20K
MSYNLLGFLQRSSNFQCQKKLWQLNGRLEYCLKDRMNFDIPEEIKQLQQFQKEDAALTIYEMLQNIFAIFRQDSSSTGWNETIVENLLANVYHQINHLKTVLEEKLEKEDFTRGKLMSSLHLKRYYGRILHYLKAKEYSHCAWTIVRVEILRNFYFINRLTGYLRN

SEQ ID NO: 404 - protein, 166 aa, Homo sapiens
  W22D
MSYNLLGFLQRSSNFQCQKLLDQLNGRLEYCLKDRMNFDIPEEIKQLQQFQKEDAALTIYEMLQNIFAIFRQDSSSTGWNETIVENLLANVYHQINHLKTVLEEKLEKEDFTRGKLMSSLHLKRYYGRILHYLKAKEYSHCAWTIVRVEILRNFYFINRLTGYLRN

SEQ ID NO: 405 - protein, 166 aa, Homo sapiens
  W22E
MSYNLLGFLQRSSNFQCQKLLEQLNGRLEYCLKDRMNFDIPEEIKQLQQFQKEDAALTIYEMLQNIFAIFRQDSSSTGWNETIVENLLANVYHQINHLKTVLEEKLEKEDFTRGKLMSSLHLKRYYGRILHYLKAKEYSHCAWTIVRVEILRNFYFINRLTGYLRN

SEQ ID NO: 406 - protein, 166 aa, Homo sapiens
  W22K
MSYNLLGFLQRSSNFQCQKLLKQLNGRLEYCLKDRMNFDIPEEIKQLQQFQKEDAALTIYEMLQNIFAIFRQDSSSTGWNETIVENLLANVYHQINHLKTVLEEKLEKEDFTRGKLMSSLHLKRYYGRILHYLKAKEYSHCAWTIVRVEILRNFYFINRLTGYLRN

SEQ ID NO: 407 - protein, 166 aa, Homo sapiens
  W22R
MSYNLLGFLQRSSNFQCQKLLRQLNGRLEYCLKDRMNFDIPEEIKQLQQFQKEDAALTIYEMLQNIFAIFRQDSSSTGWNETIVENLLANVYHQINHLKTVLEEKLEKEDFTRGKLMSSLHLKRYYGRILHYLKAKEYSHCAWTIVRVEILRNFYFINRLTGYLRN

SEQ ID NO: 408 - protein, 166 aa, Homo sapiens
  Q23D
MSYNLLGFLQRSSNFQCQKLLWDLNGRLEYCLKDRMNFDIPEEIKQLQQFQKEDAALTIYEMLQNIFAIFRQDSSSTGWNETIVENLLANVYHQINHLKTVLEEKLEKEDFTRGKLMSSLHLKRYYGRILHYLKAKEYSHCAWTIVRVEILRNFYFINRLTGYLRN

SEQ ID NO: 409 - protein, 166 aa, Homo sapiens
  Q23E
MSYNLLGFLQRSSNFQCQKLLWELNGRLEYCLKDRMNFDIPEEIKQLQQFQKEDAALTIYEMLQNIFAIFRQDSSSTGWNETIVENLLANVYHQINHLKTVLEEKLEKEDFTRGKLMSSLHLKRYYGRILHYLKAKEYSHCAWTIVRVEILRNFYFINRLTGYLRN

SEQ ID NO: 410 - protein, 166 aa, Homo sapiens
  Q23K
MSYNLLGFLQRSSNFQCQKLLWKLNGRLEYCLKDRMNFDIPEEIKQLQQFQKEDAALTIYEMLQNIFAIFRQDSSSTGWNETIVENLLANVYHQINHLKTVLEEKLEKEDFTRGKLMSSLHLKRYYGRILHYLKAKEYSHCAWTIVRVEILRNFYFINRLTGYLRN

SEQ ID NO: 411 - protein, 166 aa, Homo sapiens
  Q23R
MSYNLLGFLQRSSNFQCQKLLWRLNGRLEYCLKDRMNFDIPEEIKQLQQFQKEDAALTIYEMLQNIFAIFRQDSSSTGWNETIVENLLANVYHQINHLKTVLEEKLEKEDFTRGKLMSSLHLKRYYGRILHYLKAKEYSHCAWTIVRVEILRNFYFINRLTGYLRN

SEQ ID NO: 412 - protein, 166 aa, Homo sapiens
  L24D
MSYNLLGFLQRSSNFQCQKLLWQDNGRLEYCLKDRMNFDIPEEIKQLQQFQKEDAALTIYEMLQNIFAIFRQDSSSTGWNETIVENLLANVYHQINHLKTVLEEKLEKEDFTRGKLMSSLHLKRYYGRILHYLKAKEYSHCAWTIVRVEILRNFYFINRLTGYLRN

SEQ ID NO: 413 - protein, 166 aa, Homo sapiens
  L24E
MSYNLLGFLQRSSNFQCQKLLWQENGRLEYCLKDRMNFDIPEEIKQLQQFQKEDAALTIYEMLQNIFAIFRQDSSSTGWNETIVENLLANVYHQINHLKTVLEEKLEKEDFTRGKLMSSLHLKRYYGRILHYLKAKEYSHCAWTIVRVEILRNFYFINRLTGYLRN

SEQ ID NO: 414 - protein, 166 aa, Homo sapiens
  L24K
MSYNLLGFLQRSSNFQCQKLLWQKNGRLEYCLKDRMNFDIPEEIKQLQQFQKEDAALTIYEMLQNIFAIFRQDSSSTGWNETIVENLLANVYHQINHLKTVLEEKLEKEDFTRGKLMSSLHLKRYYGRILHYLKAKEYSHCAWTIVRVEILRNFYFINRLTGYLRN

SEQ ID NO: 415 - protein, 166 aa, Homo sapiens
  L24R
MSYNLLGFLQRSSNFQCQKLLWQRNGRLEYCLKDRMNFDIPEEIKQLQQFQKEDAALTIYEMLQNIFAIFRQDSSSTGWNETIVENLLANVYHQINHLKTVLEEKLEKEDFTRGKLMSSLHLKRYYGRILHYLKAKEYSHCAWTIVRVEILRNFYFINRLTGYLRN

SEQ ID NO: 416 - protein, 166 aa, Homo sapiens
  G78D
MSYNLLGFLQRSSNFQCQKLLWQLNGRLEYCLKDRMNFDIPEEIKQLQQFQKEDAALTIYEMLQNIFAIFRQDSSSTDWNETIVENLLANVYHQINHLKTVLEEKLEKEDFTRGKLMSSLHLKRYYGRILHYLKAKEYSHCAWTIVRVEILRNFYFINRLTGYLRN

SEQ ID NO: 417 - protein, 166 aa, Homo sapiens
  G78E
MSYNLLGFLQRSSNFQCQKLLWQLNGRLEYCLKDRMNFDIPEEIKQLQQFQKEDAALTIYEMLQNIFAIFRQDSSSTEWNETIVENLLANVYHQINHLKTVLEEKLEKEDFTRGKLMSSLHLKRYYGRILHYLKAKEYSHCAWTIVRVEILRNFYFINRLTGYLRN

SEQ ID NO: 418 - protein, 166 aa, Homo sapiens
  G78K
MSYNLLGFLQRSSNFQCQKLLWQLNGRLEYCLKDRMNFDIPEEIKQLQQFQKEDAALTIYEMLQNIFAIFRQDSSSTKWNETIVENLLANVYHQINHLKTVLEEKLEKEDFTRGKLMSSLHLKRYYGRILHYLKAKEYSHCAWTIVRVEILRNFYFINRLTGYLRN

SEQ ID NO: 419 - protein, 166 aa, Homo sapiens
  G78R
MSYNLLGFLQRSSNFQCQKLLWQLNGRLEYCLKDRMNFDIPEEIKQLQQFQKEDAALTIYEMLQNIFAIFRQDSSSTRWNETIVENLLANVYHQINHLKTVLEEKLEKEDFTRGKLMSSLHLKRYYGRILHYLKAKEYSHCAWTIVRVEILRNFYFINRLTGYLRN

SEQ ID NO: 420 - protein, 166 aa, Homo sapiens
  W79D
MSYNLLGFLQRSSNFQCQKLLWQLNGRLEYCLKDRMNFDIPEEIKQLQQFQKEDAALTIYEMLQNIFAIFRQDSSSTGDNETIVENLLANVYHQINHLKTVLEEKLEKEDFTRGKLMSSLHLKRYYGRILHYLKAKEYSHCAWTIVRVEILRNFYFINRLTGYLRN

SEQ ID NO: 421 - protein, 166 aa, Homo sapiens
  W79E
MSYNLLGFLQRSSNFQCQKLLWQLNGRLEYCLKDRMNFDIPEEIKQLQQFQKEDAALTIYEMLQNIFAIFRQDSSSTGENETIVENLLANVYHQINHLKTVLEEKLEKEDFTRGKLMSSLHLKRYYGRILHYLKAKEYSHCAWTIVRVEILRNFYFINRLTGYLRN

SEQ ID NO: 422 - protein, 166 aa, Homo sapiens
  W79K
MSYNLLGFLQRSSNFQCQKLLWQLNGRLEYCLKDRMNFDIPEEIKQLQQFQKEDAALTIYEMLQNIFAIFRQDSSSTGKNETIVENLLANVYHQINHLKTVLEEKLEKEDFTRGKLMSSLHLKRYYGRILHYLKAKEYSHCAWTIVRVEILRNFYFINRLTGYLRN

SEQ ID NO: 423 - protein, 166 aa, Homo sapiens
  W79R
MSYNLLGFLQRSSNFQCQKLLWQLNGRLEYCLKDRMNFDIPEEIKQLQQFQKEDAALTIYEMLQNIFAIFRQDSSSTGRNETIVENLLANVYHQINHLKTVLEEKLEKEDFTRGKLMSSLHLKRYYGRILHYLKAKEYSHCAWTIVRVEILRNFYFINRLTGYLRN

SEQ ID NO: 424 - protein, 166 aa, Homo sapiens
  N80D
MSYNLLGFLQRSSNFQCQKLLWQLNGRLEYCLKDRMNFDIPEEIKQLQQFQKEDAALTIYEMLQNIFAIFRQDSSSTGWDETIVENLLANVYHQINHLKTVLEEKLEKEDFTRGKLMSSLHLKRYYGRILHYLKAKEYSHCAWTIVRVEILRNFYFINRLTGYLRN

SEQ ID NO: 425 - protein, 166 aa, Homo sapiens
  N80E
MSYNLLGFLQRSSNFQCQKLLWQLNGRLEYCLKDRMNFDIPEEIKQLQQFQKEDAALTIYEMLQNIFAIFRQDSSSTGWEETIVENLLANVYHQINHLKTVLEEKLEKEDFTRGKLMSSLHLKRYYGRILHYLKAKEYSHCAWTIVRVEILRNFYFINRLTGYLRN

SEQ ID NO: 426 - protein, 166 aa, Homo sapiens
  N80K
MSYNLLGFLQRSSNFQCQKLLWQLNGRLEYCLKDRMNFDIPEEIKQLQQFQKEDAALTIYEMLQNIFAIFRQDSSSTGWKETIVENLLANVYHQINHLKTVLEEKLEKEDFTRGKLMSSLHLKRYYGRILHYLKAKEYSHCAWTIVRVEILRNFYFINRLTGYLRN

SEQ ID NO: 427 - protein, 166 aa, Homo sapiens
  N80R
MSYNLLGFLQRSSNFQCQKLLWQLNGRLEYCLKDRMNFDIPEEIKQLQQFQKEDAALTIYEMLQNIFAIFRQDSSSTGWRETIVENLLANVYHQINHLKTVLEEKLEKEDFTRGKLMSSLHLKRYYGRILHYLKAKEYSHCAWTIVRVEILRNFYFINRLTGYLRN

SEQ ID NO: 428 - protein, 166 aa, Homo sapiens
  T82D
MSYNLLGFLQRSSNFQCQKLLWQLNGRLEYCLKDRMNFDIPEEIKQLQQFQKEDAALTIYEMLQNIFAIFRQDSSSTGWNEDIVENLLANVYHQINHLKTVLEEKLEKEDFTRGKLMSSLHLKRYYGRILHYLKAKEYSHCAWTIVRVEILRNFYFINRLTGYLRN

SEQ ID NO: 429 - protein, 166 aa, Homo sapiens
  T82E
MSYNLLGFLQRSSNFQCQKLLWQLNGRLEYCLKDRMNFDIPEEIKQLQQFQKEDAALTIYEMLQNIFAIFRQDSSSTGWNEEIVENLLANVYHQINHLKTVLEEKLEKEDFTRGKLMSSLHLKRYYGRILHYLKAKEYSHCAWTIVRVEILRNFYFINRLTGYLRN

SEQ ID NO: 430 - protein, 166 aa, Homo sapiens
  T82K
MSYNLLGFLQRSSNFQCQKLLWQLNGRLEYCLKDRMNFDIPEEIKQLQQFQKEDAALTIYEMLQNIFAIFRQDSSSTGWNEKIVENLLANVYHQINHLKTVLEEKLEKEDFTRGKLMSSLHLKRYYGRILHYLKAKEYSHCAWTIVRVEILRNFYFINRLTGYLRN

SEQ ID NO: 431 - protein, 166 aa, Homo sapiens
  T82R
MSYNLLGFLQRSSNFQCQKLLWQLNGRLEYCLKDRMNFDIPEEIKQLQQFQKEDAALTIYEMLQNIFAIFRQDSSSTGWNERIVENLLANVYHQINHLKTVLEEKLEKEDFTRGKLMSSLHLKRYYGRILHYLKAKEYSHCAWTIVRVEILRNFYFINRLTGYLRN

SEQ ID NO: 432 - protein, 166 aa, Homo sapiens
  I83D
MSYNLLGFLQRSSNFQCQKLLWQLNGRLEYCLKDRMNFDIPEEIKQLQQFQKEDAALTIYEMLQNIFAIFRQDSSSTGWNETDVENLLANVYHQINHLKTVLEEKLEKEDFTRGKLMSSLHLKRYYGRILHYLKAKEYSHCAWTIVRVEILRNFYFINRLTGYLRN

SEQ ID NO: 433 - protein, 166 aa, Homo sapiens
  I83E
MSYNLLGFLQRSSNFQCQKLLWQLNGRLEYCLKDRMNFDIPEEIKQLQQFQKEDAALTIYEMLQNIFAIFRQDSSSTGWNETEVENLLANVYHQINHLKTVLEEKLEKEDFTRGKLMSSLHLKRYYGRILHYLKAKEYSHCAWTIVRVEILRNFYFINRLTGYLRN

SEQ ID NO: 434 - protein, 166 aa, Homo sapiens
  I83K
MSYNLLGFLQRSSNFQCQKLLWQLNGRLEYCLKDRMNFDIPEEIKQLQQFQKEDAALTIYEMLQNIFAIFRQDSSSTGWNETKVENLLANVYHQINHLKTVLEEKLEKEDFTRGKLMSSLHLKRYYGRILHYLKAKEYSHCAWTIVRVEILRNFYFINRLTGYLRN

SEQ ID NO: 435 - protein, 166 aa, Homo sapiens
  I83R
MSYNLLGFLQRSSNFQCQKLLWQLNGRLEYCLKDRMNFDIPEEIKQLQQFQKEDAALTIYEMLQNIFAIFRQDSSSTGWNETRVENLLANVYHQINHLKTVLEEKLEKEDFTRGKLMSSLHLKRYYGRILHYLKAKEYSHCAWTIVRVEILRNFYFINRLTGYLRN

SEQ ID NO: 436 - protein, 166 aa, Homo sapiens
  I83N
MSYNLLGFLQRSSNFQCQKLLWQLNGRLEYCLKDRMNFDIPEEIKQLQQFQKEDAALTIYEMLQNIFAIFRQDSSSTGWNETNVENLLANVYHQINHLKTVLEEKLEKEDFTRGKLMSSLHLKRYYGRILHYLKAKEYSHCAWTIVRVEILRNFYFINRLTGYLRN

SEQ ID NO: 437 - protein, 166 aa, Homo sapiens
  I83Q
MSYNLLGFLQRSSNFQCQKLLWQLNGRLEYCLKDRMNFDIPEEIKQLQQFQKEDAALTIYEMLQNIFAIFRQDSSSTGWNETQVENLLANVYHQINHLKTVLEEKLEKEDFTRGKLMSSLHLKRYYGRILHYLKAKEYSHCAWTIVRVEILRNFYFINRLTGYLRN

SEQ ID NO: 438 - protein, 166 aa, Homo sapiens
  I83S
MSYNLLGFLQRSSNFQCQKLLWQLNGRLEYCLKDRMNFDIPEEIKQLQQFQKEDAALTIYEMLQNIFAIFRQDSSSTGWNETSVENLLANVYHQINHLKTVLEEKLEKEDFTRGKLMSSLHLKRYYGRILHYLKAKEYSHCAWTIVRVEILRNFYFINRLTGYLRN

SEQ ID NO: 439 - protein, 166 aa, Homo sapiens
  I83T
MSYNLLGFLQRSSNFQCQKLLWQLNGRLEYCLKDRMNFDIPEEIKQLQQFQKEDAALTIYEMLQNIFAIFRQDSSSTGWNETTVENLLANVYHQINHLKTVLEEKLEKEDFTRGKLMSSLHLKRYYGRILHYLKAKEYSHCAWTIVRVEILRNFYFINRLTGYLRN

SEQ ID NO: 440 - protein, 166 aa, Homo sapiens
  N86D
MSYNLLGFLQRSSNFQCQKLLWQLNGRLEYCLKDRMNFDIPEEIKQLQQFQKEDAALTIYEMLQNIFAIFRQDSSSTGWNETIVEDLLANVYHQINHLKTVLEEKLEKEDFTRGKLMSSLHLKRYYGRILHYLKAKEYSHCAWTIVRVEILRNFYFINRLTGYLRN

SEQ ID NO: 441 - protein, 166 aa, Homo sapiens
  N86E
MSYNLLGFLQRSSNFQCQKLLWQLNGRLEYCLKDRMNFDIPEEIKQLQQFQKEDAALTIYEMLQNIFAIFRQDSSSTGWNETIVEELLANVYHQINHLKTVLEEKLEKEDFTRGKLMSSLHLKRYYGRILHYLKAKEYSHCAWTIVRVEILRNFYFINRLTGYLRN

SEQ ID NO: 442 - protein, 166 aa, Homo sapiens
  N86K
MSYNLLGFLQRSSNFQCQKLLWQLNGRLEYCLKDRMNFDIPEEIKQLQQFQKEDAALTIYEMLQNIFAIFRQDSSSTGWNETIVEKLLANVYHQINHLKTVLEEKLEKEDFTRGKLMSSLHLKRYYGRILHYLKAKEYSHCAWTIVRVEILRNFYFINRLTGYLRN

SEQ ID NO: 443 - protein, 166 aa, Homo sapiens
  N86R
MSYNLLGFLQRSSNFQCQKLLWQLNGRLEYCLKDRMNFDIPEEIKQLQQFQKEDAALTIYEMLQNIFAIFRQDSSSTGWNETIVERLLANVYHQINHLKTVLEEKLEKEDFTRGKLMSSLHLKRYYGRILHYLKAKEYSHCAWTIVRVEILRNFYFINRLTGYLRN

SEQ ID NO: 444 - protein, 166 aa, Homo sapiens
  N86Q
MSYNLLGFLQRSSNFQCQKLLWQLNGRLEYCLKDRMNFDIPEEIKQLQQFQKEDAALTIYEMLQNIFAIFRQDSSSTGWNETIVEQLLANVYHQINHLKTVLEEKLEKEDFTRGKLMSSLHLKRYYGRILHYLKAKEYSHCAWTIVRVEILRNFYFINRLTGYLRN

SEQ ID NO: 445 - protein, 166 aa, Homo sapiens
  N86S
MSYNLLGFLQRSSNFQCQKLLWQLNGRLEYCLKDRMNFDIPEEIKQLQQFQKEDAALTIYEMLQNIFAIFRQDSSSTGWNETIVESLLANVYHQINHLKTVLEEKLEKEDFTRGKLMSSLHLKRYYGRILHYLKAKEYSHCAWTIVRVEILRNFYFINRLTGYLRN

SEQ ID NO: 446 - protein, 166 aa, Homo sapiens
  N86T
MSYNLLGFLQRSSNFQCQKLLWQLNGRLEYCLKDRMNFDIPEEIKQLQQFQKEDAALTIYEMLQNIFAIFRQDSSSTGWNETIVETLLANVYHQINHLKTVLEEKLEKEDFTRGKLMSSLHLKRYYGRILHYLKAKEYSHCAWTIVRVEILRNFYFINRLTGYLRN

SEQ ID NO: 447 - protein, 166 aa, Homo sapiens
  L87D
MSYNLLGFLQRSSNFQCQKLLWQLNGRLEYCLKDRMNFDIPEEIKQLQQFQKEDAALTIYEMLQNIFAIFRQDSSSTGWNETIVENDLANVYHQINHLKTVLEEKLEKEDFTRGKLMSSLHLKRYYGRILHYLKAKEYSHCAWTIVRVEILRNFYFINRLTGYLRN

SEQ ID NO: 448 - protein, 166 aa, Homo sapiens
  L87E
MSYNLLGFLQRSSNFQCQKLLWQLNGRLEYCLKDRMNFDIPEEIKQLQQFQKEDAALTIYEMLQNIFAIFRQDSSSTGWNETIVENELANVYHQINHLKTVLEEKLEKEDFTRGKLMSSLHLKRYYGRILHYLKAKEYSHCAWTIVRVEILRNFYFINRLTGYLRN

SEQ ID NO: 449 - protein, 166 aa, Homo sapiens
  L87K
MSYNLLGFLQRSSNFQCQKLLWQLNGRLEYCLKDRMNFDIPEEIKQLQQFQKEDAALTIYEMLQNIFAIFRQDSSSTGWNETIVENKLANVYHQINHLKTVLEEKLEKEDFTRGKLMSSLHLKRYYGRILHYLKAKEYSHCAWTIVRVEILRNFYFINRLTGYLRN

SEQ ID NO: 450 - protein, 166 aa, Homo sapiens
  L87R
MSYNLLGFLQRSSNFQCQKLLWQLNGRLEYCLKDRMNFDIPEEIKQLQQFQKEDAALTIYEMLQNIFAIFRQDSSSTGWNETIVENRLANVYHQINHLKTVLEEKLEKEDFTRGKLMSSLHLKRYYGRILHYLKAKEYSHCAWTIVRVEILRNFYFINRLTGYLRN

SEQ ID NO: 451 - protein, 166 aa, Homo sapiens
  L87N
MSYNLLGFLQRSSNFQCQKLLWQLNGRLEYCLKDRMNFDIPEEIKQLQQFQKEDAALTIYEMLQNIFAIFRQDSSSTGWNETIVENNLANVYHQINHLKTVLEEKLEKEDFTRGKLMSSLHLKRYYGRILHYLKAKEYSHCAWTIVRVEILRNFYFINRLTGYLRN

SEQ ID NO: 452 - protein, 166 aa, Homo sapiens
  L87Q
MSYNLLGFLQRSSNFQCQKLLWQLNGRLEYCLKDRMNFDIPEEIKQLQQFQKEDAALTIYEMLQNIFAIFRQDSSSTGWNETIVENQLANVYHQINHLKTVLEEKLEKEDFTRGKLMSSLHLKRYYGRILHYLKAKEYSHCAWTIVRVEILRNFYFINRLTGYLRN

SEQ ID NO: 453 - protein, 166 aa, Homo sapiens
  L87S
MSYNLLGFLQRSSNFQCQKLLWQLNGRLEYCLKDRMNFDIPEEIKQLQQFQKEDAALTIYEMLQNIFAIFRQDSSSTGWNETIVENSLANVYHQINHLKTVLEEKLEKEDFTRGKLMSSLHLKRYYGRILHYLKAKEYSHCAWTIVRVEILRNFYFINRLTGYLRN

SEQ ID NO: 454 - protein, 166 aa, Homo sapiens
  L87T
MSYNLLGFLQRSSNFQCQKLLWQLNGRLEYCLKDRMNFDIPEEIKQLQQFQKEDAALTIYEMLQNIFAIFRQDSSSTGWNETIVENTLANVYHQINHLKTVLEEKLEKEDFTRGKLMSSLHLKRYYGRILHYLKAKEYSHCAWTIVRVEILRNFYFINRLTGYLRN

SEQ ID NO: 455 - protein, 166 aa, Homo sapiens
  A89D
MSYNLLGFLQRSSNFQCQKLLWQLNGRLEYCLKDRMNFDIPEEIKQLQQFQKEDAALTIYEMLQNIFAIFRQDSSSTGWNETIVENLLDNVYHQINHLKTVLEEKLEKEDFTRGKLMSSLHLKRYYGRILHYLKAKEYSHCAWTIVRVEILRNFYFINRLTGYLRN

SEQ ID NO: 456 - protein, 166 aa, Homo sapiens
  A89E
MSYNLLGFLQRSSNFQCQKLLWQLNGRLEYCLKDRMNFDIPEEIKQLQQFQKEDAALTIYEMLQNIFAIFRQDSSSTGWNETIVENLLENVYHQINHLKTVLEEKLEKEDFTRGKLMSSLHLKRYYGRILHYLKAKEYSHCAWTIVRVEILRNFYFINRLTGYLRN

SEQ ID NO: 457 - protein, 166 aa, Homo sapiens
  A89K
MSYNLLGFLQRSSNFQCQKLLWQLNGRLEYCLKDRMNFDIPEEIKQLQQFQKEDAALTIYEMLQNIFAIFRQDSSSTGWNETIVENLLKNVYHQINHLKTVLEEKLEKEDFTRGKLMSSLHLKRYYGRILHYLKAKEYSHCAWTIVRVEILRNFYFINRLTGYLRN

SEQ ID NO: 458 - protein, 166 aa, Homo sapiens
  A89R
MSYNLLGFLQRSSNFQCQKLLWQLNGRLEYCLKDRMNFDIPEEIKQLQQFQKEDAALTIYEMLQNIFAIFRQDSSSTGWNETIVENLLRNVYHQINHLKTVLEEKLEKEDFTRGKLMSSLHLKRYYGRILHYLKAKEYSHCAWTIVRVEILRNFYFINRLTGYLRN

SEQ ID NO: 459 - protein, 166 aa, Homo sapiens
  N90T
MSYNLLGFLQRSSNFQCQKLLWQLNGRLEYCLKDRMNFDIPEEIKQLQQFQKEDAALTIYEMLQNIFAIFRQDSSSTGWNETIVENLLADVYHQINHLKTVLEEKLEKEDFTRGKLMSSLHLKRYYGRILHYLKAKEYSHCAWTIVRVEILRNFYFINRLTGYLRN

SEQ ID NO: 460 - protein, 166 aa, Homo sapiens
  N90E
MSYNLLGFLQRSSNFQCQKLLWQLNGRLEYCLKDRMNFDIPEEIKQLQQFQKEDAALTIYEMLQNIFAIFRQDSSSTGWNETIVENLLAEVYHQINHLKTVLEEKLEKEDFTRGKLMSSLHLKRYYGRILHYLKAKEYSHCAWTIVRVEILRNFYFINRLTGYLRN

SEQ ID NO: 461 - protein, 166 aa, Homo sapiens
  N90K
MSYNLLGFLQRSSNFQCQKLLWQLNGRLEYCLKDRMNFDIPEEIKQLQQFQKEDAALTIYEMLQNIFAIFRQDSSSTGWNETIVENLLAKVYHQINHLKTVLEEKLEKEDFTRGKLMSSLHLKRYYGRILHYLKAKEYSHCAWTIVRVEILRNFYFINRLTGYLRN

SEQ ID NO: 462 - protein, 166 aa, Homo sapiens
  N90Q
MSYNLLGFLQRSSNFQCQKLLWQLNGRLEYCLKDRMNFDIPEEIKQLQQFQKEDAALTIYEMLQNIFAIFRQDSSSTGWNETIVENLLAQVYHQINHLKTVLEEKLEKEDFTRGKLMSSLHLKRYYGRILHYLKAKEYSHCAWTIVRVEILRNFYFINRLTGYLRN

SEQ ID NO: 463 - protein, 166 aa, Homo sapiens
  N90R
MSYNLLGFLQRSSNFQCQKLLWQLNGRLEYCLKDRMNFDIPEEIKQLQQFQKEDAALTIYEMLQNIFAIFRQDSSSTGWNETIVENLLARVYHQINHLKTVLEEKLEKEDFTRGKLMSSLHLKRYYGRILHYLKAKEYSHCAWTIVRVEILRNFYFINRLTGYLRN

SEQ ID NO: 464 - protein, 166 aa, Homo sapiens
  N90S
MSYNLLGFLQRSSNFQCQKLLWQLNGRLEYCLKDRMNFDIPEEIKQLQQFQKEDAALTIYEMLQNIFAIFRQDSSSTGWNETIVENLLASVYHQINHLKTVLEEKLEKEDFTRGKLMSSLHLKRYYGRILHYLKAKEYSHCAWTIVRVEILRNFYFINRLTGYLRN

SEQ ID NO: 465 - protein, 166 aa, Homo sapiens
  N90T
MSYNLLGFLQRSSNFQCQKLLWQLNGRLEYCLKDRMNFDIPEEIKQLQQFQKEDAALTIYEMLQNIFAIFRQDSSSTGWNETIVENLLATVYHQINHLKTVLEEKLEKEDFTRGKLMSSLHLKRYYGRILHYLKAKEYSHCAWTIVRVEILRNFYFINRLTGYLRN

SEQ ID NO: 466 - protein, 166 aa, Homo sapiens
  V91D
MSYNLLGFLQRSSNFQCQKLLWQLNGRLEYCLKDRMNFDIPEEIKQLQQFQKEDAALTIYEMLQNIFAIFRQDSSSTGWNETIVENLLANDYHQINHLKTVLEEKLEKEDFTRGKLMSSLHLKRYYGRILHYLKAKEYSHCAWTIVRVEILRNFYFINRLTGYLRN

SEQ ID NO: 467 - protein, 166 aa, Homo sapiens
  V91E
MSYNLLGFLQRSSNFQCQKLLWQLNGRLEYCLKDRMNFDIPEEIKQLQQFQKEDAALTIYEMLQNIFAIFRQDSSSTGWNETIVENLLANEYHQINHLKTVLEEKLEKEDFTRGKLMSSLHLKRYYGRILHYLKAKEYSHCAWTIVRVEILRNFYFINRLTGYLRN

SEQ ID NO: 468 - protein, 166 aa, Homo sapiens
  V91K
MSYNLLGFLQRSSNFQCQKLLWQLNGRLEYCLKDRMNFDIPEEIKQLQQFQKEDAALTIYEMLQNIFAIFRQDSSSTGWNETIVENLLANKYHQINHLKTVLEEKLEKEDFTRGKLMSSLHLKRYYGRILHYLKAKEYSHCAWTIVRVEILRNFYFINRLTGYLRN

SEQ ID NO: 469 - protein, 166 aa, Homo sapiens
  V91N
MSYNLLGFLQRSSNFQCQKLLWQLNGRLEYCLKDRMNFDIPEEIKQLQQFQKEDAALTIYEMLQNIFAIFRQDSSSTGWNETIVENLLANNYHQINHLKTVLEEKLEKEDFTRGKLMSSLHLKRYYGRILHYLKAKEYSHCAWTIVRVEILRNFYFINRLTGYLRN

SEQ ID NO: 470 - protein, 166 aa, Homo sapiens
  V91Q
MSYNLLGFLQRSSNFQCQKLLWQLNGRLEYCLKDRMNFDIPEEIKQLQQFQKEDAALTIYEMLQNIFAIFRQDSSSTGWNETIVENLLANQYHQINHLKTVLEEKLEKEDFTRGKLMSSLHLKRYYGRILHYLKAKEYSHCAWTIVRVEILRNFYFINRLTGYLRN

SEQ ID NO: 471 - protein, 166 aa, Homo sapiens
  V91R
MSYNLLGFLQRSSNFQCQKLLWQLNGRLEYCLKDRMNFDIPEEIKQLQQFQKEDAALTIYEMLQNIFAIFRQDSSSTGWNETIVENLLANRYHQINHLKTVLEEKLEKEDFTRGKLMSSLHLKRYYGRILHYLKAKEYSHCAWTIVRVEILRNFYFINRLTGYLRN

SEQ ID NO: 472 - protein, 166 aa, Homo sapiens
  V91S
MSYNLLGFLQRSSNFQCQKLLWQLNGRLEYCLKDRMNFDIPEEIKQLQQFQKEDAALTIYEMLQNIFAIFRQDSSSTGWNETIVENLLANSYHQINHLKTVLEEKLEKEDFTRGKLMSSLHLKRYYGRILHYLKAKEYSHCAWTIVRVEILRNFYFINRLTGYLRN

SEQ ID NO: 473 - protein, 166 aa, Homo sapiens
  V91T
MSYNLLGFLQRSSNFQCQKLLWQLNGRLEYCLKDRMNFDIPEEIKQLQQFQKEDAALTIYEMLQNIFAIFRQDSSSTGWNETIVENLLANTYHQINHLKTVLEEKLEKEDFTRGKLMSSLHLKRYYGRILHYLKAKEYSHCAWTIVRVEILRNFYFINRLTGYLRN

SEQ ID NO: 474 - protein, 166 aa, Homo sapiens
  Q94D
MSYNLLGFLQRSSNFQCQKLLWQLNGRLEYCLKDRMNFDIPEEIKQLQQFQKEDAALTIYEMLQNIFAIFRQDSSSTGWNETIVENLLANVYHDINHLKTVLEEKLEKEDFTRGKLMSSLHLKRYYGRILHYLKAKEYSHCAWTIVRVEILRNFYFINRLTGYLRN

SEQ ID NO: 475 - protein, 166 aa, Homo sapiens
  Q94E
MSYNLLGFLQRSSNFQCQKLLWQLNGRLEYCLKDRMNFDIPEEIKQLQQFQKEDAALTIYEMLQNIFAIFRQDSSSTGWNETIVENLLANVYHEINHLKTVLEEKLEKEDFTRGKLMSSLHLKRYYGRILHYLKAKEYSHCAWTIVRVEILRNFYFINRLTGYLRN

SEQ ID NO: 476 - protein, 166 aa, Homo sapiens
  Q94K
MSYNLLGFLQRSSNFQCQKLLWQLNGRLEYCLKDRMNFDIPEEIKQLQQFQKEDAALTIYEMLQNIFAIFRQDSSSTGWNETIVENLLANVYHKINHLKTVLEEKLEKEDFTRGKLMSSLHLKRYYGRILHYLKAKEYSHCAWTIVRVEILRNFYFINRLTGYLRN

SEQ ID NO: 477 - protein, 166 aa, Homo sapiens
  Q94N
MSYNLLGFLQRSSNFQCQKLLWQLNGRLEYCLKDRMNFDIPEEIKQLQQFQKEDAALTIYEMLQNIFAIFRQDSSSTGWNETIVENLLANVYHNINHLKTVLEEKLEKEDFTRGKLMSSLHLKRYYGRILHYLKAKEYSHCAWTIVRVEILRNFYFINRLTGYLRN

SEQ ID NO: 478 - protein, 166 aa, Homo sapiens
  Q94R
MSYNLLGFLQRSSNFQCQKLLWQLNGRLEYCLKDRMNFDIPEEIKQLQQFQKEDAALTIYEMLQNIFAIFRQDSSSTGWNETIVENLLANVYHRINHLKTVLEEKLEKEDFTRGKLMSSLHLKRYYGRILHYLKAKEYSHCAWTIVRVEILRNFYFINRLTGYLRN

SEQ ID NO: 479 - protein, 166 aa, Homo sapiens
  Q94S
MSYNLLGFLQRSSNFQCQKLLWQLNGRLEYCLKDRMNFDIPEEIKQLQQFQKEDAALTIYEMLQNIFAIFRQDSSSTGWNETIVENLLANVYHSINHLKTVLEEKLEKEDFTRGKLMSSLHLKRYYGRILHYLKAKEYSHCAWTIVRVEILRNFYFINRLTGYLRN

SEQ ID NO: 480 - protein, 166 aa, Homo sapiens
  Q94T
MSYNLLGFLQRSSNFQCQKLLWQLNGRLEYCLKDRMNFDIPEEIKQLQQFQKEDAALTIYEMLQNIFAIFRQDSSSTGWNETIVENLLANVYHTINHLKTVLEEKLEKEDFTRGKLMSSLHLKRYYGRILHYLKAKEYSHCAWTIVRVEILRNFYFINRLTGYLRN

SEQ ID NO: 481 - protein, 166 aa, Homo sapiens
  I95D
MSYNLLGFLQRSSNFQCQKLLWQLNGRLEYCLKDRMNFDIPEEIKQLQQFQKEDAALTIYEMLQNIFAIFRQDSSSTGWNETIVENLLANVYHQDNHLKTVLEEKLEKEDFTRGKLMSSLHLKRYYGRILHYLKAKEYSHCAWTIVRVEILRNFYFINRLTGYLRN

SEQ ID NO: 482 - protein, 166 aa, Homo sapiens
  I95E
MSYNLLGFLQRSSNFQCQKLLWQLNGRLEYCLKDRMNFDIPEEIKQLQQFQKEDAALTIYEMLQNIFAIFRQDSSSTGWNETIVENLLANVYHQENHLKTVLEEKLEKEDFTRGKLMSSLHLKRYYGRILHYLKAKEYSHCAWTIVRVEILRNFYFINRLTGYLRN

SEQ ID NO: 483 - protein, 166 aa, Homo sapiens
  I95K
MSYNLLGFLQRSSNFQCQKLLWQLNGRLEYCLKDRMNFDIPEEIKQLQQFQKEDAALTIYEMLQNIFAIFRQDSSSTGWNETIVENLLANVYHQKNHLKTVLEEKLEKEDFTRGKLMSSLHLKRYYGRILHYLKAKEYSHCAWTIVRVEILRNFYFINRLTGYLRN

SEQ ID NO: 484 - protein, 166 aa, Homo sapiens
  I95N
MSYNLLGFLQRSSNFQCQKLLWQLNGRLEYCLKDRMNFDIPEEIKQLQQFQKEDAALTIYEMLQNIFAIFRQDSSSTGWNETIVENLLANVYHQNNHLKTVLEEKLEKEDFTRGKLMSSLHLKRYYGRILHYLKAKEYSHCAWTIVRVEILRNFYFINRLTGYLRN

SEQ ID NO: 485 - protein, 166 aa, Homo sapiens
  I95Q
MSYNLLGFLQRSSNFQCQKLLWQLNGRLEYCLKDRMNFDIPEEIKQLQQFQKEDAALTIYEMLQNIFAIFRQDSSSTGWNETIVENLLANVYHQQNHLKTVLEEKLEKEDFTRGKLMSSLHLKRYYGRILHYLKAKEYSHCAWTIVRVEILRNFYFINRLTGYLRN

SEQ ID NO: 486 - protein, 166 aa, Homo sapiens
  I95R
MSYNLLGFLQRSSNFQCQKLLWQLNGRLEYCLKDRMNFDIPEEIKQLQQFQKEDAALTIYEMLQNIFAIFRQDSSSTGWNETIVENLLANVYHQRNHLKTVLEEKLEKEDFTRGKLMSSLHLKRYYGRILHYLKAKEYSHCAWTIVRVEILRNFYFINRLTGYLRN

SEQ ID NO: 487 - protein, 166 aa, Homo sapiens
  I95S
MSYNLLGFLQRSSNFQCQKLLWQLNGRLEYCLKDRMNFDIPEEIKQLQQFQKEDAALTIYEMLQNIFAIFRQDSSSTGWNETIVENLLANVYHQSNHLKTVLEEKLEKEDFTRGKLMSSLHLKRYYGRILHYLKAKEYSHCAWTIVRVEILRNFYFINRLTGYLRN

SEQ ID NO: 488 - protein, 166 aa, Homo sapiens
  I95T
MSYNLLGFLQRSSNFQCQKLLWQLNGRLEYCLKDRMNFDIPEEIKQLQQFQKEDAALTIYEMLQNIFAIFRQDSSSTGWNETIVENLLANVYHQTNHLKTVLEEKLEKEDFTRGKLMSSLHLKRYYGRILHYLKAKEYSHCAWTIVRVEILRNFYFINRLTGYLRN

SEQ ID NO: 489 - protein, 166 aa, Homo sapiens
  H97D
MSYNLLGFLQRSSNFQCQKLLWQLNGRLEYCLKDRMNFDIPEEIKQLQQFQKEDAALTIYEMLQNIFAIFRQDSSSTGWNETIVENLLANVYHQINDLKTVLEEKLEKEDFTRGKLMSSLHLKRYYGRILHYLKAKEYSHCAWTIVRVEILRNFYFINRLTGYLRN

SEQ ID NO: 490 - protein, 166 aa, Homo sapiens
  H97E
MSYNLLGFLQRSSNFQCQKLLWQLNGRLEYCLKDRMNFDIPEEIKQLQQFQKEDAALTIYEMLQNIFAIFRQDSSSTGWNETIVENLLANVYHQINELKTVLEEKLEKEDFTRGKLMSSLHLKRYYGRILHYLKAKEYSHCAWTIVRVEILRNFYFINRLTGYLRN

SEQ ID NO: 491 - protein, 166 aa, Homo sapiens
  H97K
MSYNLLGFLQRSSNFQCQKLLWQLNGRLEYCLKDRMNFDIPEEIKQLQQFQKEDAALTIYEMLQNIFAIFRQDSSSTGWNETIVENLLANVYHQINKLKTVLEEKLEKEDFTRGKLMSSLHLKRYYGRILHYLKAKEYSHCAWTIVRVEILRNFYFINRLTGYLRN

SEQ ID NO: 492 - protein, 166 aa, Homo sapiens
  H97N
MSYNLLGFLQRSSNFQCQKLLWQLNGRLEYCLKDRMNFDIPEEIKQLQQFQKEDAALTIYEMLQNIFAIFRQDSSSTGWNETIVENLLANVYHQINNLKTVLEEKLEKEDFTRGKLMSSLHLKRYYGRILHYLKAKEYSHCAWTIVRVEILRNFYFINRLTGYLRN

SEQ ID NO: 493 - protein, 166 aa, Homo sapiens
  H97Q
MSYNLLGFLQRSSNFQCQKLLWQLNGRLEYCLKDRMNFDIPEEIKQLQQFQKEDAALTIYEMLQNIFAIFRQDSSSTGWNETIVENLLANVYHQINQLKTVLEEKLEKEDFTRGKLMSSLHLKRYYGRILHYLKAKEYSHCAWTIVRVEILRNFYFINRLTGYLRN

SEQ ID NO: 494 - protein, 166 aa, Homo sapiens
  H97R
MSYNLLGFLQRSSNFQCQKLLWQLNGRLEYCLKDRMNFDIPEEIKQLQQFQKEDAALTIYEMLQNIFAIFRQDSSSTGWNETIVENLLANVYHQINRLKTVLEEKLEKEDFTRGKLMSSLHLKRYYGRILHYLKAKEYSHCAWTIVRVEILRNFYFINRLTGYLRN

SEQ ID NO: 495 - protein, 166 aa, Homo sapiens
  H97S
MSYNLLGFLQRSSNFQCQKLLWQLNGRLEYCLKDRMNFDIPEEIKQLQQFQKEDAALTIYEMLQNIFAIFRQDSSSTGWNETIVENLLANVYHQINSLKTVLEEKLEKEDFTRGKLMSSLHLKRYYGRILHYLKAKEYSHCAWTIVRVEILRNFYFINRLTGYLRN

SEQ ID NO: 496 - protein, 166 aa, Homo sapiens
  H97T
MSYNLLGFLQRSSNFQCQKLLWQLNGRLEYCLKDRMNFDIPEEIKQLQQFQKEDAALTIYEMLQNIFAIFRQDSSSTGWNETIVENLLANVYHQINTLKTVLEEKLEKEDFTRGKLMSSLHLKRYYGRILHYLKAKEYSHCAWTIVRVEILRNFYFINRLTGYLRN

SEQ ID NO: 497 - protein, 166 aa, Homo sapiens
  L98D
MSYNLLGFLQRSSNFQCQKLLWQLNGRLEYCLKDRMNFDIPEEIKQLQQFQKEDAALTIYEMLQNIFAIFRQDSSSTGWNETIVENLLANVYHQINHDKTVLEEKLEKEDFTRGKLMSSLHLKRYYGRILHYLKAKEYSHCAWTIVRVEILRNFYFINRLTGYLRN

SEQ ID NO: 498 - protein, 166 aa, Homo sapiens
  L98E
MSYNLLGFLQRSSNFQCQKLLWQLNGRLEYCLKDRMNFDIPEEIKQLQQFQKEDAALTIYEMLQNIFAIFRQDSSSTGWNETIVENLLANVYHQINHEKTVLEEKLEKEDFTRGKLMSSLHLKRYYGRILHYLKAKEYSHCAWTIVRVEILRNFYFINRLTGYLRN

SEQ ID NO: 499 - protein, 166 aa, Homo sapiens
  L98K
MSYNLLGFLQRSSNFQCQKLLWQLNGRLEYCLKDRMNFDIPEEIKQLQQFQKEDAALTIYEMLQNIFAIFRQDSSSTGWNETIVENLLANVYHQINHKKTVLEEKLEKEDFTRGKLMSSLHLKRYYGRILHYLKAKEYSHCAWTIVRVEILRNFYFINRLTGYLRN

SEQ ID NO: 500 - protein, 166 aa, Homo sapiens
  L98N
MSYNLLGFLQRSSNFQCQKLLWQLNGRLEYCLKDRMNFDIPEEIKQLQQFQKEDAALTIYEMLQNIFAIFRQDSSSTGWNETIVENLLANVYHQINHNKTVLEEKLEKEDFTRGKLMSSLHLKRYYGRILHYLKAKEYSHCAWTIVRVEILRNFYFINRLTGYLRN

SEQ ID NO: 501 - protein, 166 aa, Homo sapiens
  L98Q
MSYNLLGFLQRSSNFQCQKLLWQLNGRLEYCLKDRMNFDIPEEIKQLQQFQKEDAALTIYEMLQNIFAIFRQDSSSTGWNETIVENLLANVYHQINHQKTVLEEKLEKEDFTRGKLMSSLHLKRYYGRILHYLKAKEYSHCAWTIVRVEILRNFYFINRLTGYLRN

SEQ ID NO: 502 - protein, 166 aa, Homo sapiens
  L98R
MSYNLLGFLQRSSNFQCQKLLWQLNGRLEYCLKDRMNFDIPEEIKQLQQFQKEDAALTIYEMLQNIFAIFRQDSSSTGWNETIVENLLANVYHQINHRKTVLEEKLEKEDFTRGKLMSSLHLKRYYGRILHYLKAKEYSHCAWTIVRVEILRNFYFINRLTGYLRN

SEQ ID NO: 503 - protein, 166 aa, Homo sapiens
  L98S
MSYNLLGFLQRSSNFQCQKLLWQLNGRLEYCLKDRMNFDIPEEIKQLQQFQKEDAALTIYEMLQNIFAIFRQDSSSTGWNETIVENLLANVYHQINHSKTVLEEKLEKEDFTRGKLMSSLHLKRYYGRILHYLKAKEYSHCAWTIVRVEILRNFYFINRLTGYLRN

SEQ ID NO: 504 - protein, 166 aa, Homo sapiens
  L98T
MSYNLLGFLQRSSNFQCQKLLWQLNGRLEYCLKDRMNFDIPEEIKQLQQFQKEDAALTIYEMLQNIFAIFRQDSSSTGWNETIVENLLANVYHQINHTKTVLEEKLEKEDFTRGKLMSSLHLKRYYGRILHYLKAKEYSHCAWTIVRVEILRNFYFINRLTGYLRN

SEQ ID NO: 505 - protein, 166 aa, Homo sapiens
  V101D
MSYNLLGFLQRSSNFQCQKLLWQLNGRLEYCLKDRMNFDIPEEIKQLQQFQKEDAALTIYEMLQNIFAIFRQDSSSTGWNETIVENLLANVYHQINHLKTDLEEKLEKEDFTRGKLMSSLHLKRYYGRILHYLKAKEYSHCAWTIVRVEILRNFYFINRLTGYLRN

SEQ ID NO: 506 - protein, 166 aa, Homo sapiens
  V101E
MSYNLLGFLQRSSNFQCQKLLWQLNGRLEYCLKDRMNFDIPEEIKQLQQFQKEDAALTIYEMLQNIFAIFRQDSSSTGWNETIVENLLANVYHQINHLKTELEEKLEKEDFTRGKLMSSLHLKRYYGRILHYLKAKEYSHCAWTIVRVEILRNFYFINRLTGYLRN

SEQ ID NO: 507 - protein, 166 aa, Homo sapiens
  V101K
MSYNLLGFLQRSSNFQCQKLLWQLNGRLEYCLKDRMNFDIPEEIKQLQQFQKEDAALTIYEMLQNIFAIFRQDSSSTGWNETIVENLLANVYHQINHLKTKLEEKLEKEDFTRGKLMSSLHLKRYYGRILHYLKAKEYSHCAWTIVRVEILRNFYFINRLTGYLRN

SEQ ID NO: 508 - protein, 166 aa, Homo sapiens
  V101N
MSYNLLGFLQRSSNFQCQKLLWQLNGRLEYCLKDRMNFDIPEEIKQLQQFQKEDAALTIYEMLQNIFAIFRQDSSSTGWNETIVENLLANVYHQINHLKTNLEEKLEKEDFTRGKLMSSLHLKRYYGRILHYLKAKEYSHCAWTIVRVEILRNFYFINRLTGYLRN

SEQ ID NO: 509 - protein, 166 aa, Homo sapiens
  V101Q
MSYNLLGFLQRSSNFQCQKLLWQLNGRLEYCLKDRMNFDIPEEIKQLQQFQKEDAALTIYEMLQNIFAIFRQDSSSTGWNETIVENLLANVYHQINHLKTQLEEKLEKEDFTRGKLMSSLHLKRYYGRILHYLKAKEYSHCAWTIVRVEILRNFYFINRLTGYLRN

SEQ ID NO: 510 - protein, 166 aa, Homo sapiens
  V101R
MSYNLLGFLQRSSNFQCQKLLWQLNGRLEYCLKDRMNFDIPEEIKQLQQFQKEDAALTIYEMLQNIFAIFRQDSSSTGWNETIVENLLANVYHQINHLKTRLEEKLEKEDFTRGKLMSSLHLKRYYGRILHYLKAKEYSHCAWTIVRVEILRNFYFINRLTGYLRN

SEQ ID NO: 511 - protein, 166 aa, Homo sapiens
  V101S
MSYNLLGFLQRSSNFQCQKLLWQLNGRLEYCLKDRMNFDIPEEIKQLQQFQKEDAALTIYEMLQNIFAIFRQDSSSTGWNETIVENLLANVYHQINHLKTSLEEKLEKEDFTRGKLMSSLHLKRYYGRILHYLKAKEYSHCAWTIVRVEILRNFYFINRLTGYLRN

SEQ ID NO: 512 - protein, 166 aa, Homo sapiens
  V101T
MSYNLLGFLQRSSNFQCQKLLWQLNGRLEYCLKDRMNFDIPEEIKQLQQFQKEDAALTIYEMLQNIFAIFRQDSSSTGWNETIVENLLANVYHQINHLKTTLEEKLEKEDFTRGKLMSSLHLKRYYGRILHYLKAKEYSHCAWTIVRVEILRNFYFINRLTGYLRN

SEQ ID NO: 513 - DNA, 55 bp, Artificial Sequence
  EcoR1 forward primer
gcctgtatgatttattggatgttggaattccctgatgcggtattttctccttacg

SEQ ID NO: 514 - DNA, 55 bp, Artificial Sequence
  EcoR1 reverse primer
cgtaaggagaaaataccgcatcagggaattccaacatccaataaatcatacaggc

SEQ ID NO: 515 - DNA, 35 bp, Artificial Sequence
  Seq ClaI forward primer
ctgattatcaaccggggtacatatgattgacatgc

SEQ ID NO: 516 - DNA, 31 bp, Artificial Sequence
  Seq XmnI reverse primer
tacgggataataccgcgccacatagcagaac

SEQ ID NO: 517 - DNA, 18 bp, Artificial Sequence
  Seq forward primer
cctgatgaaggaggactc

SEQ ID NO: 518 - DNA, 18 bp, Artificial Sequence
  Seq reverse primer
ccaagcagcagatgagtc

SEQ ID NO: 519 - protein, 166 aa, Homo sapiens
  R124E
MSYNLLGFLQRSSNFQCQKLLWQLNGRLEYCLKDRMNFDIPEEIKQLQQFQKEDAALTIYEMLQNIFAIFRQDSSSTGWNETIVENLLANVYHQINHLKTVLEEKLEKEDFTRGKLMSSLHLKEYYGRILHYLKAKEYSHCAWTIVRVEILRNFYFINRLTGYLRN

SEQ ID NO: 520 - protein, 166 aa, Homo sapiens
  R124D
MSYNLLGFLQRSSNFQCQKLLWQLNGRLEYCLKDRMNFDIPEEIKQLQQFQKEDAALTIYEMLQNIFAIFRQDSSSTGWNETIVENLLANVYHQINHLKTVLEEKLEKEDFTRGKLMSSLHLKDYYGRILHYLKAKEYSHCAWTIVRVEILRNFYFINRLTGYLRN

SEQ ID NO: 521 - protein, 188 aa, Homo sapiens [sequence omitted]

SEQ ID NO: 522 - protein, 188 aa, Homo sapiens
MALTFALLVALLVLSCKSSCSVGCDLPQTHSLGSRRTLMLLAQMRRISLFSCLKDRHDFGFPQEEFGNQFQKAETIPVLHEMIQQIFNLFSTKDSSAAWDETLLDKFYTELYQQLNDLEACVIQGVGVTETPLMKEDSILAVRKYFQRITLYLKEKKYSPCAWEVVRAEIMRSFSLSTNLQESLRSKE

SEQ ID NO: 523 - protein, 188 aa, Homo sapiens
MALTFALLVALLVLSCKSSCSVGCDLPQTHSLGSRRTLMLLAQMRRISLFSCLKDRRDFGFPQEEFGNQFQKAETIPVLHEMIQQIFNLFSTKDSSAAWDETLLDKFYTELYQQLNDLEACVIQGVGVTETPLMKEDSILAVRKYFQRITLYLKEKKYSPCAWEVVRAEIMRSFSLSTNLQESLRSKE

SEQ ID NO: 524 - protein, 165 aa, Homo sapiens
CDLPQTHSLGSRRTLMLLAQMRKISLFSCLKDRHDFGFPQEEFGNQFQKAETIPVLHEMIQQIFNLFSTKDSSAAWDETLLDKFYTELYQQLNDLEACVIQGVGVTETPLMKEDSILAVRKYFQRITLYLKEKKYSPCAWEVVRAEIMRSFSLSTNLQESLRSKE

SEQ ID NO: 525 - protein, 165 aa, Homo sapiens [sequence omitted]

SEQ ID NO: 526 - protein, 165 aa, Homo sapiens
CDLPQTHSLGSRRTLMLLAQMRRISLFSCLKDRRDFGFPQEEFGNQFQKAETIPVLHEMIQQIFNLFSTKDSSAAWDETLLDKFYTELYQQLNDLEACVIQGVGVTETPLMKEDSILAVRKYFQRITLYLKEKKYSPCAWEVVRAEIMRSFSLSTNLQESLRSKE

SEQ ID NO: 527 - protein, 187 aa, Pan troglodytes
MTNKCLLQIALLLCFSTTALSMSYNLLGFLQRSSNIQCQKLLWQLNGRLEYCLKDRMNFDIPEEIKQLQQFQKEDAALTIYEMLQNIFAIFRQDSSSTGWNETIVKNLLANVYHQINHLKTVLEEKPEKEDFTRGKFMSSLHLKRYYGRILHYLKAKEYSHCAWTIVRVEILRNFYFINRLAGYLRN

SEQ ID NO: 528 - protein, 187 aa, Macaca fascicularis
MTNKCLLQIALLLCFSTTALSMSYNLLGFLQRSSSFQCQKLLWQLNGRLEYCLKDRMNFDIPEEIKQPQQFQKEDAALTIYEMLQNIYAIFRQDLSSTGWNETIVENLLANVYHQIDHLKTILEEKLEKEDFTRGKFVSSLHLKRYYGRILHYLKAKEYSHCAWTIVRVEILRNFFFINKLTGYLRN

SEQ ID NO: 529 - protein, 186 aa, Sus scrofa
MANKCILQIALLMCFSTTALSMSYDVLRYQQRSSNLACQKLLGQLPGTPQYCLEDRMNFEVPEEIMQPPQFQKEDAVLIIHEMLQQIFGILRRNFSSTGWNETVIKTILVELDGQMDDLETILEEIMEEENFPRGDMTILHLKKYYLSILQYLKSKEYRSCAWTVVQVEILRNFSFLNRLTDYLRN

SEQ ID NO: 530 - protein, 197 aa, Canis familiaris
MVIGETLPIFIMTSRCILQTTLLLYFSTMALAMSNDLLRSQLSSSSLECQELLLQLNGTTEYCLKDRINFEIPEEIEKSRQFQKEDIILITHEMFQKIFDIFRRNISRTGWNETTVENLLVKLHWQKEHLEIILEDVKEKENFTWDNRTLLHLKKYYLRIVQYLKAKEYSICAWTIVQAEICRNFFFLNILTDYLQN

SEQ ID NO: 531 - protein, 186 aa, Equus caballus
MTYRWILPMALLLCFSTTALSVNYDLLRSQLRSSNSACLMLLRQLNGAPQRCPEDTMNFQVPEEIEQAQQFQKEDAALVIYEMLQHTWRIFRRNFASTGWNETIVKNLLVEVHLQMDRLETNLEEIMEEESSTWGNTTILRLKKYYGRISQYLKAKKYSHCAWTVVQAEMLRNLAFLNGLTDYLQN

SEQ ID NO: 532 - protein, 186 aa, Bos taurus
MTHRCLLPMVLLLCFSTTALSRSYSLLQFQQRRSLAVCQKLLWQLPSTPQHCLEARMDFQMPEEMKQAQQFRKEDAILVMYEMLQHIFGILTRDFSNTGWSETIIEDLLEELYGQMNRLQPIQKEIMQKQNFTMGDTTVLHLRKYYFNLMQYLKSKEYNRCAWTVVRVQILRNFSFLMRLTDYLRD

SEQ ID NO: 533 - protein, 182 aa, Mus musculus
MNNRWILHAAFLLCFSTTALSINYKQLQLQERTNIRKCQELLEQLNGKINLTYRADFKIPMEMTEKMQKSYTAFAIQEMLQNVFLVFRNNFSSTGWNETIVVRLLDELHQQTVFLKTVLEEKQEERLTWEMSSTALHLKSYYWRVQRYLKLMKYNSYAWMVVRAEIFRNFLIIRRLTRNFQN

SEQ ID NO: 534 - protein, 166 aa, Homo sapiens
  L6H
MSYNLHGFLQRSSNFQCQKLLWQLNGRLEYCLKDRMNFDIPEEIKQLQQFQKEDAALTIYEMLQNIFAIFRQDSSSTGWNETIVENLLANVYHQINHLKTVLEEKLEKEDFTRGKLMSSLHLKRYYGRILHYLKAKEYSHCAWTIVRVEILRNFYFINRLTGYLRN

SEQ ID NO: 535 - protein, 166 aa, Homo sapiens
  L6A
MSYNLAGFLQRSSNFQCQKLLWQLNGRLEYCLKDRMNFDIPEEIKQLQQFQKEDAALTIYEMLQNIFAIFRQDSSSTGWNETIVENLLANVYHQINHLKTVLEEKLEKEDFTRGKLMSSLHLKRYYGRILHYLKAKEYSHCAWTIVRVEILRNFYFINRLTGYLRN

SEQ ID NO: 536 - protein, 166 aa, Homo sapiens
  K19N
MSYNLLGFLQRSSNFQCQNLLWQLNGRLEYCLKDRMNFDIPEEIKQLQQFQKEDAALTIYEMLQNIFAIFRQDSSSTGWNETIVENLLANVYHQINHLKTVLEEKLEKEDFTRGKLMSSLHLKRYYGRILHYLKAKEYSHCAWTIVRVEILRNFYFINRLTGYLRN

SEQ ID NO: 537 - protein, 166 aa, Homo sapiens
  L20H
MSYNLLGFLQRSSNFQCQKHLWQLNGRLEYCLKDRMNFDIPEEIKQLQQFQKEDAALTIYEMLQNIFAIFRQDSSSTGWNETIVENLLANVYHQINHLKTVLEEKLEKEDFTRGKLMSSLHLKRYYGRILHYLKAKEYSHCAWTIVRVEILRNFYFINRLTGYLRN

SEQ ID NO: 538 - protein, 166 aa, Homo sapiens
  L20A
MSYNLLGFLQRSSNFQCQKALWQLNGRLEYCLKDRMNFDIPEEIKQLQQFQKEDAALTIYEMLQNIFAIFRQDSSSTGWNETIVENLLANVYHQINHLKTVLEEKLEKEDFTRGKLMSSLHLKRYYGRILHYLKAKEYSHCAWTIVRVEILRNFYFINRLTGYLRN

SEQ ID NO: 539 - protein, 166 aa, Homo sapiens
  L21T
MSYNLLGFLQRSSNFQCQKLTWQLNGRLEYCLKDRMNFDIPEEIKQLQQFQKEDAALTIYEMLQNIFAIFRQDSSSTGWNETIVENLLANVYHQINHLKTVLEEKLEKEDFTRGKLMSSLHLKRYYGRILHYLKAKEYSHCAWTIVRVEILRNFYFINRLTGYLRN

SEQ ID NO: 540 - protein, 166 aa, Homo sapiens
  L21Q
MSYNLLGFLQRSSNFQCQKLQWQLNGRLEYCLKDRMNFDIPEEIKQLQQFQKEDAALTIYEMLQNIFAIFRQDSSSTGWNETIVENLLANVYHQINHLKTVLEEKLEKEDFTRGKLMSSLHLKRYYGRILHYLKAKEYSHCAWTIVRVEILRNFYFINRLTGYLRN

SEQ ID NO: 541 - protein, 166 aa, Homo sapiens
  L21H
MSYNLLGFLQRSSNFQCQKLHWQLNGRLEYCLKDRMNFDIPEEIKQLQQFQKEDAALTIYEMLQNIFAIFRQDSSSTGWNETIVENLLANVYHQINHLKTVLEEKLEKEDFTRGKLMSSLHLKRYYGRILHYLKAKEYSHCAWTIVRVEILRNFYFINRLTGYLRN

SEQ ID NO: 542 - protein, 166 aa, Homo sapiens
  L21A
MSYNLLGFLQRSSNFQCQKLAWQLNGRLEYCLKDRMNFDIPEEIKQLQQFQKEDAALTIYEMLQNIFAIFRQDSSSTGWNETIVENLLANVYHQINHLKTVLEEKLEKEDFTRGKLMSSLHLKRYYGRILHYLKAKEYSHCAWTIVRVEILRNFYFINRLTGYLRN

SEQ ID NO: 543 - protein, 166 aa, Homo sapiens
  L24T
MSYNLLGFLQRSSNFQCQKLLWQTNGRLEYCLKDRMNFDIPEEIKQLQQFQKEDAALTIYEMLQNIFAIFRQDSSSTGWNETIVENLLANVYHQINHLKTVLEEKLEKEDFTRGKLMSSLHLKRYYGRILHYLKAKEYSHCAWTIVRVEILRNFYFINRLTGYLRN

SEQ ID NO: 544 - protein, 166 aa, Homo sapiens
  L24Q
MSYNLLGFLQRSSNFQCQKLLWQQNGRLEYCLKDRMNFDIPEEIKQLQQFQKEDAALTIYEMLQNIFAIFRQDSSSTGWNETIVENLLANVYHQINHLKTVLEEKLEKEDFTRGKLMSSLHLKRYYGRILHYLKAKEYSHCAWTIVRVEILRNFYFINRLTGYLRN

SEQ ID NO: 545 - protein, 166 aa, Homo sapiens
  L24H
MSYNLLGFLQRSSNFQCQKLLWQHNGRLEYCLKDRMNFDIPEEIKQLQQFQKEDAALTIYEMLQNIFAIFRQDSSSTGWNETIVENLLANVYHQINHLKTVLEEKLEKEDFTRGKLMSSLHLKRYYGRILHYLKAKEYSHCAWTIVRVEILRNFYFINRLTGYLRN

SEQ ID NO: 546 - protein, 166 aa, Homo sapiens
  L24A
MSYNLLGFLQRSSNFQCQKLLWQANGRLEYCLKDRMNFDIPEEIKQLQQFQKEDAALTIYEMLQNIFAIFRQDSSSTGWNETIVENLLANVYHQINHLKTVLEEKLEKEDFTRGKLMSSLHLKRYYGRILHYLKAKEYSHCAWTIVRVEILRNFYFINRLTGYLRN

SEQ ID NO: 547 - protein, 166 aa, Homo sapiens
  E29N
MSYNLLGFLQRSSNFQCQKLLWQLNGRLNYCLKDRMNFDIPEEIKQLQQFQKEDAALTIYEMLQNIFAIFRQDSSSTGWNETIVENLLANVYHQINHLKTVLEEKLEKEDFTRGKLMSSLHLKRYYGRILHYLKAKEYSHCAWTIVRVEILRNFYFINRLTGYLRN

SEQ ID NO: 548 - protein, 166 aa, Homo sapiens
  K33N
MSYNLLGFLQRSSNFQCQKLLWQLNGRLEYCLNDRMNFDIPEEIKQLQQFQKEDAALTIYEMLQNIFAIFRQDSSSTGWNETIVENLLANVYHQINHLKTVLEEKLEKEDFTRGKLMSSLHLKRYYGRILHYLKAKEYSHCAWTIVRVEILRNFYFINRLTGYLRN

SEQ ID NO: 549 - protein, 166 aa, Homo sapiens
  D34G
MSYNLLGFLQRSSNFQCQKLLWQLNGRLEYCLKGRMNFDIPEEIKQLQQFQKEDAALTIYEMLQNIFAIFRQDSSSTGWNETIVENLLANVYHQINHLKTVLEEKLEKEDFTRGKLMSSLHLKRYYGRILHYLKAKEYSHCAWTIVRVEILRNFYFINRLTGYLRN

SEQ ID NO: 550 - protein, 166 aa, Homo sapiens
  D39N
MSYNLLGFLQRSSNFQCQKLLWQLNGRLEYCLKDRMNFNIPEEIKQLQQFQKEDAALTIYEMLQNIFAIFRQDSSSTGWNETIVENLLANVYHQINHLKTVLEEKLEKEDFTRGKLMSSLHLKRYYGRILHYLKAKEYSHCAWTIVRVEILRNFYFINRLTGYLRN

SEQ ID NO: 551 - protein, 166 aa, Homo sapiens
  E42N
MSYNLLGFLQRSSNFQCQKLLWQLNGRLEYCLKDRMNFDIPNEIKQLQQFQKEDAALTIYEMLQNIFAIFRQDSSSTGWNETIVENLLANVYHQINHLKTVLEEKLEKEDFTRGKLMSSLHLKRYYGRILHYLKAKEYSHCAWTIVRVEILRNFYFINRLTGYLRN

SEQ ID NO: 552 - protein, 166 aa, Homo sapiens
  K45N
MSYNLLGFLQRSSNFQCQKLLWQLNGRLEYCLKDRMNFDIPEEINQLQQFQKEDAALTIYEMLQNIFAIFRQDSSSTGWNETIVENLLANVYHQINHLKTVLEEKLEKEDFTRGKLMSSLHLKRYYGRILHYLKAKEYSHCAWTIVRVEILRNFYFINRLTGYLRN

SEQ ID NO: 553 - protein, 166 aa, Homo sapiens
  K52N
MSYNLLGFLQRSSNFQCQKLLWQLNGRLEYCLKDRMNFDIPEEIKQLQQFQNEDAALTIYEMLQNIFAIFRQDSSSTGWNETIVENLLANVYHQINHLKTVLEEKLEKEDFTRGKLMSSLHLKRYYGRILHYLKAKEYSHCAWTIVRVEILRNFYFINRLTGYLRN

SEQ ID NO: 554 - protein, 166 aa, Homo sapiens
  D54G
MSYNLLGFLQRSSNFQCQKLLWQLNGRLEYCLKDRMNFDIPEEIKQLQQFQKEGAALTIYEMLQNIFAIFRQDSSSTGWNETIVENLLANVYHQINHLKTVLEEKLEKEDFTRGKLMSSLHLKRYYGRILHYLKAKEYSHCAWTIVRVEILRNFYFINRLTGYLRN

SEQ ID NO: 555 - protein, 166 aa, Homo sapiens
  L57T
MSYNLLGFLQRSSNFQCQKLLWQLNGRLEYCLKDRMNFDIPEEIKQLQQFQKEDAATTIYEMLQNIFAIFRQDSSSTGWNETIVENLLANVYHQINHLKTVLEEKLEKEDFTRGKLMSSLHLKRYYGRILHYLKAKEYSHCAWTIVRVEILRNFYFINRLTGYLRN

SEQ ID NO: 556 - protein, 166 aa, Homo sapiens
  L57Q
MSYNLLGFLQRSSNFQCQKLLWQLNGRLEYCLKDRMNFDIPEEIKQLQQFQKEDAAQTIYEMLQNIFAIFRQDSSSTGWNETIVENLLANVYHQINHLKTVLEEKLEKEDFTRGKLMSSLHLKRYYGRILHYLKAKEYSHCAWTIVRVEILRNFYFINRLTGYLRN

SEQ ID NO: 557 - protein, 166 aa, Homo sapiens
  L57H
MSYNLLGFLQRSSNFQCQKLLWQLNGRLEYCLKDRMNFDIPEEIKQLQQFQKEDAAHTIYEMLQNIFAIFRQDSSSTGWNETIVENLLANVYHQINHLKTVLEEKLEKEDFTRGKLMSSLHLKRYYGRILHYLKAKEYSHCAWTIVRVEILRNFYFINRLTGYLRN

SEQ ID NO: 558 - protein, 166 aa, Homo sapiens
  L57A
MSYNLLGFLQRSSNFQCQKLLWQLNGRLEYCLKDRMNFDIPEEIKQLQQFQKEDAAATIYEMLQNIFAIFRQDSSSTGWNETIVENLLANVYHQINHLKTVLEEKLEKEDFTRGKLMSSLHLKRYYGRILHYLKAKEYSHCAWTIVRVEILRNFYFINRLTGYLRN

SEQ ID NO: 559 - protein, 166 aa, Homo sapiens
  M62T
MSYNLLGFLQRSSNFQCQKLLWQLNGRLEYCLKDRMNFDIPEEIKQLQQFQKEDAALTIYETLQNIFAIFRQDSSSTGWNETIVENLLANVYHQINHLKTVLEEKLEKEDFTRGKLMSSLHLKRYYGRILHYLKAKEYSHCAWTIVRVEILRNFYFINRLTGYLRN

SEQ ID NO: 560 - protein, 166 aa, Homo sapiens
  M62Q
MSYNLLGFLQRSSNFQCQKLLWQLNGRLEYCLKDRMNFDIPEEIKQLQQFQKEDAALTIYEQLQNIFAIFRQDSSSTGWNETIVENLLANVYHQINHLKTVLEEKLEKEDFTRGKLMSSLHLKRYYGRILHYLKAKEYSHCAWTIVRVEILRNFYFINRLTGYLRN

SEQ ID NO: 561 - protein, 166 aa, Homo sapiens
  M62A
MSYNLLGFLQRSSNFQCQKLLWQLNGRLEYCLKDRMNFDIPEEIKQLQQFQKEDAALTIYEALQNIFAIFRQDSSSTGWNETIVENLLANVYHQINHLKTVLEEKLEKEDFTRGKLMSSLHLKRYYGRILHYLKAKEYSHCAWTIVRVEILRNFYFINRLTGYLRN

SEQ ID NO: 562 - protein, 166 aa, Homo sapiens
  L63T
MSYNLLGFLQRSSNFQCQKLLWQLNGRLEYCLKDRMNFDIPEEIKQLQQFQKEDAALTIYEMTQNIFAIFRQDSSSTGWNETIVENLLANVYHQINHLKTVLEEKLEKEDFTRGKLMSSLHLKRYYGRILHYLKAKEYSHCAWTIVRVEILRNFYFINRLTGYLRN

SEQ ID NO: 563 - protein, 166 aa, Homo sapiens
  L63Q
MSYNLLGFLQRSSNFQCQKLLWQLNGRLEYCLKDRMNFDIPEEIKQLQQFQKEDAALTIYEMQQNIFAIFRQDSSSTGWNETIVENLLANVYHQINHLKTVLEEKLEKEDFTRGKLMSSLHLKRYYGRILHYLKAKEYSHCAWTIVRVEILRNFYFINRLTGYLRN

SEQ ID NO: 564 - protein, 166 aa, Homo sapiens
  L63H
MSYNLLGFLQRSSNFQCQKLLWQLNGRLEYCLKDRMNFDIPEEIKQLQQFQKEDAALTIYEMHQNIFAIFRQDSSSTGWNETIVENLLANVYHQINHLKTVLEEKLEKEDFTRGKLMSSLHLKRYYGRILHYLKAKEYSHCAWTIVRVEILRNFYFINRLTGYLRN

SEQ ID NO: 565 - protein, 166 aa, Homo sapiens
  L63A
MSYNLLGFLQRSSNFQCQKLLWQLNGRLEYCLKDRMNFDIPEEIKQLQQFQKEDAALTIYEMAQNIFAIFRQDSSSTGWNETIVENLLANVYHQINHLKTVLEEKLEKEDFTRGKLMSSLHLKRYYGRILHYLKAKEYSHCAWTIVRVEILRNFYFINRLTGYLRN

SEQ ID NO: 566 - protein, 166 aa, Homo sapiens
  D73N
MSYNLLGFLQRSSNFQCQKLLWQLNGRLEYCLKDRMNFDIPEEIKQLQQFQKEDAALTIYEMLQNIFAIFRQNSSSTGWNETIVENLLANVYHQINHLKTVLEEKLEKEDFTRGKLMSSLHLKRYYGRILHYLKAKEYSHCAWTIVRVEILRNFYFINRLTGYLRN

SEQ ID NO: 567 - protein, 166 aa, Homo sapiens
  E81N
MSYNLLGFLQRSSNFQCQKLLWQLNGRLEYCLKDRMNFDIPEEIKQLQQFQKEDAALTIYEMLQNIFAIFRQDSSSTGWNNTIVENLLANVYHQINHLKTVLEEKLEKEDFTRGKLMSSLHLKRYYGRILHYLKAKEYSHCAWTIVRVEILRNFYFINRLTGYLRN

SEQ ID NO: 568 - protein, 166 aa, Homo sapiens
  E85N
MSYNLLGFLQRSSNFQCQKLLWQLNGRLEYCLKDRMNFDIPEEIKQLQQFQKEDAALTIYEMLQNIFAIFRQDSSSTGWNETIVNNLLANVYHQINHLKTVLEEKLEKEDFTRGKLMSSLHLKRYYGRILHYLKAKEYSHCAWTIVRVEILRNFYFINRLTGYLRN

SEQ ID NO: 569 - protein, 166 aa, Homo sapiens
  L87H
MSYNLLGFLQRSSNFQCQKLLWQLNGRLEYCLKDRMNFDIPEEIKQLQQFQKEDAALTIYEMLQNIFAIFRQDSSSTGWNETIVENHLANVYHQINHLKTVLEEKLEKEDFTRGKLMSSLHLKRYYGRILHYLKAKEYSHCAWTIVRVEILRNFYFINRLTGYLRN

SEQ ID NO: 570 - protein, 166 aa, Homo sapiens
  L87A
MSYNLLGFLQRSSNFQCQKLLWQLNGRLEYCLKDRMNFDIPEEIKQLQQFQKEDAALTIYEMLQNIFAIFRQDSSSTGWNETIVENALANVYHQINHLKTVLEEKLEKEDFTRGKLMSSLHLKRYYGRILHYLKAKEYSHCAWTIVRVEILRNFYFINRLTGYLRN

SEQ ID NO: 571 - protein, 166 aa, Homo sapiens
  L88T
MSYNLLGFLQRSSNFQCQKLLWQLNGRLEYCLKDRMNFDIPEEIKQLQQFQKEDAALTIYEMLQNIFAIFRQDSSSTGWNETIVENLTANVYHQINHLKTVLEEKLEKEDFTRGKLMSSLHLKRYYGRILHYLKAKEYSHCAWTIVRVEILRNFYFINRLTGYLRN

SEQ ID NO: 572 - protein, 166 aa, Homo sapiens
  L88Q
MSYNLLGFLQRSSNFQCQKLLWQLNGRLEYCLKDRMNFDIPEEIKQLQQFQKEDAALTIYEMLQNIFAIFRQDSSSTGWNETIVENLQANVYHQINHLKTVLEEKLEKEDFTRGKLMSSLHLKRYYGRILHYLKAKEYSHCAWTIVRVEILRNFYFINRLTGYLRN

SEQ ID NO: 573 - protein, 166 aa, Homo sapiens
  L88H
MSYNLLGFLQRSSNFQCQKLLWQLNGRLEYCLKDRMNFDIPEEIKQLQQFQKEDAALTIYEMLQNIFAIFRQDSSSTGWNETIVENLHANVYHQINHLKTVLEEKLEKEDFTRGKLMSSLHLKRYYGRILHYLKAKEYSHCAWTIVRVEILRNFYFINRLTGYLRN

SEQ ID NO: 574 - protein, 166 aa, Homo sapiens
  L88A
MSYNLLGFLQRSSNFQCQKLLWQLNGRLEYCLKDRMNFDIPEEIKQLQQFQKEDAALTIYEMLQNIFAIFRQDSSSTGWNETIVENLAANVYHQINHLKTVLEEKLEKEDFTRGKLMSSLHLKRYYGRILHYLKAKEYSHCAWTIVRVEILRNFYFINRLTGYLRN

SEQ ID NO: 575 - protein, 166 aa, Homo sapiens
  L98H
MSYNLLGFLQRSSNFQCQKLLWQLNGRLEYCLKDRMNFDIPEEIKQLQQFQKEDAALTIYEMLQNIFAIFRQDSSSTGWNETIVENLLANVYHQINHHKTVLEEKLEKEDFTRGKLMSSLHLKRYYGRILHYLKAKEYSHCAWTIVRVEILRNFYFINRLTGYLRN

SEQ ID NO: 576 - protein, 166 aa, Homo sapiens
  L98A
MSYNLLGFLQRSSNFQCQKLLWQLNGRLEYCLKDRMNFDIPEEIKQLQQFQKEDAALTIYEMLQNIFAIFRQDSSSTGWNETIVENLLANVYHQINHAKTVLEEKLEKEDFTRGKLMSSLHLKRYYGRILHYLKAKEYSHCAWTIVRVEILRNFYFINRLTGYLRN

SEQ ID NO: 577 - protein, 166 aa, Homo sapiens
  K99N
MSYNLLGFLQRSSNFQCQKLLWQLNGRLEYCLKDRMNFDIPEEIKQLQQFQKEDAALTIYEMLQNIFAIFRQDSSSTGWNETIVENLLANVYHQINHLNTVLEEKLEKEDFTRGKLMSSLHLKRYYGRILHYLKAKEYSHCAWTIVRVEILRNFYFINRLTGYLRN

SEQ ID NO: 578 - protein, 166 aa, Homo sapiens
  L102T
MSYNLLGFLQRSSNFQCQKLLWQLNGRLEYCLKDRMNFDIPEEIKQLQQFQKEDAALTIYEMLQNIFAIFRQDSSSTGWNETIVENLLANVYHQINHLKTVTEEKLEKEDFTRGKLMSSLHLKRYYGRILHYLKAKEYSHCAWTIVRVEILRNFYFINRLTGYLRN

SEQ ID NO: 579 - protein, 166 aa, Homo sapiens
  L102Q
MSYNLLGFLQRSSNFQCQKLLWQLNGRLEYCLKDRMNFDIPEEIKQLQQFQKEDAALTIYEMLQNIFAIFRQDSSSTGWNETIVENLLANVYHQINHLKTVQEEKLEKEDFTRGKLMSSLHLKRYYGRILHYLKAKEYSHCAWTIVRVEILRNFYFINRLTGYLRN

SEQ ID NO: 580 - protein, 166 aa, Homo sapiens
  L102H
MSYNLLGFLQRSSNFQCQKLLWQLNGRLEYCLKDRMNFDIPEEIKQLQQFQKEDAALTIYEMLQNIFAIFRQDSSSTGWNETIVENLLANVYHQINHLKTVHEEKLEKEDFTRGKLMSSLHLKRYYGRILHYLKAKEYSHCAWTIVRVEILRNFYFINRLTGYLRN

SEQ ID NO: 581 - protein, 166 aa, Homo sapiens
  L102A
MSYNLLGFLQRSSNFQCQKLLWQLNGRLEYCLKDRMNFDIPEEIKQLQQFQKEDAALTIYEMLQNIFAIFRQDSSSTGWNETIVENLLANVYHQINHLKTVAEEKLEKEDFTRGKLMSSLHLKRYYGRILHYLKAKEYSHCAWTIVRVEILRNFYFINRLTGYLRN

SEQ ID NO: 582 - protein, 166 aa, Homo sapiens
  E103N
MSYNLLGFLQRSSNFQCQKLLWQLNGRLEYCLKDRMNFDIPEEIKQLQQFQKEDAALTIYEMLQNIFAIFRQDSSSTGWNETIVENLLANVYHQINHLKTVLNEKLEKEDFTRGKLMSSLHLKRYYGRILHYLKAKEYSHCAWTIVRVEILRNFYFINRLTGYLRN

SEQ ID NO: 583 - protein, 166 aa, Homo sapiens
  E104N
MSYNLLGFLQRSSNFQCQKLLWQLNGRLEYCLKDRMNFDIPEEIKQLQQFQKEDAALTIYEMLQNIFAIFRQDSSSTGWNETIVENLLANVYHQINHLKTVLENKLEKEDFTRGKLMSSLHLKRYYGRILHYLKAKEYSHCAWTIVRVEILRNFYFINRLTGYLRN

SEQ ID NO: 584 - protein, 166 aa, Homo sapiens
  K105N
MSYNLLGFLQRSSNFQCQKLLWQLNGRLEYCLKDRMNFDIPEEIKQLQQFQKEDAALTIYEMLQNIFAIFRQDSSSTGWNETIVENLLANVYHQINHLKTVLEENLEKEDFTRGKLMSSLHLKRYYGRILHYLKAKEYSHCAWTIVRVEILRNFYFINRLTGYLRN

SEQ ID NO: 585 - protein, 166 aa, Homo sapiens
  L106T
MSYNLLGFLQRSSNFQCQKLLWQLNGRLEYCLKDRMNFDIPEEIKQLQQFQKEDAALTIYEMLQNIFAIFRQDSSSTGWNETIVENLLANVYHQINHLKTVLEEKTEKEDFTRGKLMSSLHLKRYYGRILHYLKAKEYSHCAWTIVRVEILRNFYFINRLTGYLRN

SEQ ID NO: 586 - protein, 166 aa, Homo sapiens
  L106Q
MSYNLLGFLQRSSNFQCQKLLWQLNGRLEYCLKDRMNFDIPEEIKQLQQFQKEDAALTIYEMLQNIFAIFRQDSSSTGWNETIVENLLANVYHQINHLKTVLEEKQEKEDFTRGKLMSSLHLKRYYGRILHYLKAKEYSHCAWTIVRVEILRNFYFINRLTGYLRN

SEQ ID NO: 587 - protein, 166 aa, Homo sapiens
  L106H
MSYNLLGFLQRSSNFQCQKLLWQLNGRLEYCLKDRMNFDIPEEIKQLQQFQKEDAALTIYEMLQNIFAIFRQDSSSTGWNETIVENLLANVYHQINHLKTVLEEKHEKEDFTRGKLMSSLHLKRYYGRILHYLKAKEYSHCAWTIVRVEILRNFYFINRLTGYLRN

SEQ ID NO: 588 - protein, 166 aa, Homo sapiens
  L106A
MSYNLLGFLQRSSNFQCQKLLWQLNGRLEYCLKDRMNFDIPEEIKQLQQFQKEDAALTIYEMLQNIFAIFRQDSSSTGWNETIVENLLANVYHQINHLKTVLEEKAEKEDFTRGKLMSSLHLKRYYGRILHYLKAKEYSHCAWTIVRVEILRNFYFINRLTGYLRN

SEQ ID NO: 589 - protein, 166 aa, Homo sapiens
  E107N
MSYNLLGFLQRSSNFQCQKLLWQLNGRLEYCLKDRMNFDIPEEIKQLQQFQKEDAALTIYEMLQNIFAIFRQDSSSTGWNETIVENLLANVYHQINHLKTVLEEKLNKEDFTRGKLMSSLHLKRYYGRILHYLKAKEYSHCAWTIVRVEILRNFYFINRLTGYLRN

SEQ ID NO: 590 - protein, 166 aa, Homo sapiens
  K108N
MSYNLLGFLQRSSNFQCQKLLWQLNGRLEYCLKDRMNFDIPEEIKQLQQFQKEDAALTIYEMLQNIFAIFRQDSSSTGWNETIVENLLANVYHQINHLKTVLEEKLENEDFTRGKLMSSLHLKRYYGRILHYLKAKEYSHCAWTIVRVEILRNFYFINRLTGYLRN

SEQ ID NO: 591 - protein, 166 aa, Homo sapiens
  E109N
MSYNLLGFLQRSSNFQCQKLLWQLNGRLEYCLKDRMNFDIPEEIKQLQQFQKEDAALTIYEMLQNIFAIFRQDSSSTGWNETIVENLLANVYHQINHLKTVLEEKLEKNDFTRGKLMSSLHLKRYYGRILHYLKAKEYSHCAWTIVRVEILRNFYFINRLTGYLRN

SEQ ID NO: 592 - protein, 166 aa, Homo sapiens
  D110N
MSYNLLGFLQRSSNFQCQKLLWQLNGRLEYCLKDRMNFDIPEEIKQLQQFQKEDAALTIYEMLQNIFAIFRQDSSSTGWNETIVENLLANVYHQINHLKTVLEEKLEKENFTRGKLMSSLHLKRYYGRILHYLKAKEYSHCAWTIVRVEILRNFYFINRLTGYLRN

SEQ ID NO: 593 - protein, 166 aa, Homo sapiens
  K115S
MSYNLLGFLQRSSNFQCQKLLWQLNGRLEYCLKDRMNFDIPEEIKQLQQFQKEDAALTIYEMLQNIFAIFRQDSSSTGWNETIVENLLANVYHQINHLKTVLEEKLEKEDFTRGSLMSSLHLKRYYGRILHYLKAKEYSHCAWTIVRVEILRNFYFINRLTGYLRN

SEQ ID NO: 594 - protein, 166 aa, Homo sapiens
  K115H
MSYNLLGFLQRSSNFQCQKLLWQLNGRLEYCLKDRMNFDIPEEIKQLQQFQKEDAALTIYEMLQNIFAIFRQDSSSTGWNETIVENLLANVYHQINHLKTVLEEKLEKEDFTRGHLMSSLHLKRYYGRILHYLKAKEYSHCAWTIVRVEILRNFYFINRLTGYLRN

SEQ ID NO: 595 - protein, 166 aa, Homo sapiens; identical to SEQ ID NO: 55
  K115N

SEQ ID NO: 596 - protein, 166 aa, Homo sapiens
  M117T
MSYNLLGFLQRSSNFQCQKLLWQLNGRLEYCLKDRMNFDIPEEIKQLQQFQKEDAALTIYEMLQNIFAIFRQDSSSTGWNETIVENLLANVYHQINHLKTVLEEKLEKEDFTRGKLTSSLHLKRYYGRILHYLKAKEYSHCAWTIVRVEILRNFYFINRLTGYLRN

SEQ ID NO: 597 - protein, 166 aa, Homo sapiens
  M117Q
MSYNLLGFLQRSSNFQCQKLLWQLNGRLEYCLKDRMNFDIPEEIKQLQQFQKEDAALTIYEMLQNIFAIFRQDSSSTGWNETIVENLLANVYHQINHLKTVLEEKLEKEDFTRGKLQSSLHLKRYYGRILHYLKAKEYSHCAWTIVRVEILRNFYFINRLTGYLRN

SEQ ID NO: 598 - protein, 166 aa, Homo sapiens
  M117A
MSYNLLGFLQRSSNFQCQKLLWQLNGRLEYCLKDRMNFDIPEEIKQLQQFQKEDAALTIYEMLQNIFAIFRQDSSSTGWNETIVENLLANVYHQINHLKTVLEEKLEKEDFTRGKLASSLHLKRYYGRILHYLKAKEYSHCAWTIVRVEILRNFYFINRLTGYLRN

SEQ ID NO: 599 - protein, 166 aa, Homo sapiens
  L122T
MSYNLLGFLQRSSNFQCQKLLWQLNGRLEYCLKDRMNFDIPEEIKQLQQFQKEDAALTIYEMLQNIFAIFRQDSSSTGWNETIVENLLANVYHQINHLKTVLEEKLEKEDFTRGKLMSSLHTKRYYGRILHYLKAKEYSHCAWTIVRVEILRNFYFINRLTGYLRN

SEQ ID NO: 600 - protein, 166 aa, Homo sapiens; identical to SEQ ID NO: 1
  L122Q

SEQ ID NO: 601 - protein, 166 aa, Homo sapiens
  L122H
MSYNLLGFLQRSSNFQCQKLLWQLNGRLEYCLKDRMNFDIPEEIKQLQQFQKEDAALTIYEMLQNIFAIFRQDSSSTGWNETIVENLLANVYHQINHLKTVLEEKLEKEDFTRGKLMSSLHHKRYYGRILHYLKAKEYSHCAWTIVRVEILRNFYFINRLTGYLRN

SEQ ID NO: 602 - protein, 166 aa, Homo sapiens
  L122A
MSYNLLGFLQRSSNFQCQKLLWQLNGRLEYCLKDRMNFDIPEEIKQLQQFQKEDAALTIYEMLQNIFAIFRQDSSSTGWNETIVENLLANVYHQINHLKTVLEEKLEKEDFTRGKLMSSLHAKRYYGRILHYLKAKEYSHCAWTIVRVEILRNFYFINRLTGYLRN

SEQ ID NO: 603 - protein, 166 aa, Homo sapiens
  K123N
MSYNLLGFLQRSSNFQCQKLLWQLNGRLEYCLKDRMNFDIPEEIKQLQQFQKEDAALTIYEMLQNIFAIFRQDSSSTGWNETIVENLLANVYHQINHLKTVLEEKLEKEDFTRGKLMSSLHLNRYYGRILHYLKAKEYSHCAWTIVRVEILRNFYFINRLTGYLRN

SEQ ID NO: 604 - protein, 166 aa, Homo sapiens
  L133T
MSYNLLGFLQRSSNFQCQKLLWQLNGRLEYCLKDRMNFDIPEEIKQLQQFQKEDAALTIYEMLQNIFAIFRQDSSSTGWNETIVENLLANVYHQINHLKTVLEEKLEKEDFTRGKLMSSLHLKRYYGRILHYTKAKEYSHCAWTIVRVEILRNFYFINRLTGYLRN

SEQ ID NO: 605 - protein, 166 aa, Homo sapiens
  L133Q
MSYNLLGFLQRSSNFQCQKLLWQLNGRLEYCLKDRMNFDIPEEIKQLQQFQKEDAALTIYEMLQNIFAIFRQDSSSTGWNETIVENLLANVYHQINHLKTVLEEKLEKEDFTRGKLMSSLHLKRYYGRILHYQKAKEYSHCAWTIVRVEILRNFYFINRLTGYLRN

SEQ ID NO: 606 - protein, 166 aa, Homo sapiens
  L133H
MSYNLLGFLQRSSNFQCQKLLWQLNGRLEYCLKDRMNFDIPEEIKQLQQFQKEDAALTIYEMLQNIFAIFRQDSSSTGWNETIVENLLANVYHQINHLKTVLEEKLEKEDFTRGKLMSSLHLKRYYGRILHYHKAKEYSHCAWTIVRVEILRNFYFINRLTGYLRN

SEQ ID NO: 607 - protein, 166 aa, Homo sapiens
  L133A
MSYNLLGFLQRSSNFQCQKLLWQLNGRLEYCLKDRMNFDIPEEIKQLQQFQKEDAALTIYEMLQNIFAIFRQDSSSTGWNETIVENLLANVYHQINHLKTVLEEKLEKEDFTRGKLMSSLHLKRYYGRILHYAKAKEYSHCAWTIVRVEILRNFYFINRLTGYLRN

SEQ ID NO: 608 - protein, 166 aa, Homo sapiens
  K134N
MSYNLLGFLQRSSNFQCQKLLWQLNGRLEYCLKDRMNFDIPEEIKQLQQFQKEDAALTIYEMLQNIFAIFRQDSSSTGWNETIVENLLANVYHQINHLKTVLEEKLEKEDFTRGKLMSSLHLKRYYGRILHYLNAKEYSHCAWTIVRVEILRNFYFINRLTGYLRN

SEQ ID NO: 609 - protein, 166 aa, Homo sapiens
  K136N
MSYNLLGFLQRSSNFQCQKLLWQLNGRLEYCLKDRMNFDIPEEIKQLQQFQKEDAALTIYEMLQNIFAIFRQDSSSTGWNETIVENLLANVYHQINHLKTVLEEKLEKEDFTRGKLMSSLHLKRYYGRILHYLKANEYSHCAWTIVRVEILRNFYFINRLTGYLRN

SEQ ID NO: 610 - protein, 166 aa, Homo sapiens
  E137N
MSYNLLGFLQRSSNFQCQKLLWQLNGRLEYCLKDRMNFDIPEEIKQLQQFQKEDAALTIYEMLQNIFAIFRQDSSSTGWNETIVENLLANVYHQINHLKTVLEEKLEKEDFTRGKLMSSLHLKRYYGRILHYLKAKNYSHCAWTIVRVEILRNFYFINRLTGYLRN

SEQ ID NO: 611 - protein, 166 aa, Homo sapiens
  L151T
MSYNLLGFLQRSSNFQCQKLLWQLNGRLEYCLKDRMNFDIPEEIKQLQQFQKEDAALTIYEMLQNIFAIFRQDSSSTGWNETIVENLLANVYHQINHLKTVLEEKLEKEDFTRGKLMSSLHLKRYYGRILHYLKAKEYSHCAWTIVRVEITRNFYFINRLTGYLRN

SEQ ID NO: 612 - protein, 166 aa, Homo sapiens
  L151Q
MSYNLLGFLQRSSNFQCQKLLWQLNGRLEYCLKDRMNFDIPEEIKQLQQFQKEDAALTIYEMLQNIFAIFRQDSSSTGWNETIVENLLANVYHQINHLKTVLEEKLEKEDFTRGKLMSSLHLKRYYGRILHYLKAKEYSHCAWTIVRVEIQRNFYFINRLTGYLRN

SEQ ID NO: 613 - protein, 166 aa, Homo sapiens
  L151H
MSYNLLGFLQRSSNFQCQKLLWQLNGRLEYCLKDRMNFDIPEEIKQLQQFQKEDAALTIYEMLQNIFAIFRQDSSSTGWNETIVENLLANVYHQINHLKTVLEEKLEKEDFTRGKLMSSLHLKRYYGRILHYLKAKEYSHCAWTIVRVEIHRNFYFINRLTGYLRN

SEQ ID NO: 614 - protein, 166 aa, Homo sapiens
  L151A
MSYNLLGFLQRSSNFQCQKLLWQLNGRLEYCLKDRMNFDIPEEIKQLQQFQKEDAALTIYEMLQNIFAIFRQDSSSTGWNETIVENLLANVYHQINHLKTVLEEKLEKEDFTRGKLMSSLHLKRYYGRILHYLKAKEYSHCAWTIVRVEIARNFYFINRLTGYLRN

SEQ ID NO: 615 - protein, 166 aa, Homo sapiens
  L160T
MSYNLLGFLQRSSNFQCQKLLWQLNGRLEYCLKDRMNFDIPEEIKQLQQFQKEDAALTIYEMLQNIFAIFRQDSSSTGWNETIVENLLANVYHQINHLKTVLEEKLEKEDFTRGKLMSSLHLKRYYGRILHYLKAKEYSHCAWTIVRVEILRNFYFINRTTGYLRN

SEQ ID NO: 616 - protein, 166 aa, Homo sapiens
  L160Q
MSYNLLGFLQRSSNFQCQKLLWQLNGRLEYCLKDRMNFDIPEEIKQLQQFQKEDAALTIYEMLQNIFAIFRQDSSSTGWNETIVENLLANVYHQINHLKTVLEEKLEKEDFTRGKLMSSLHLKRYYGRILHYLKAKEYSHCAWTIVRVEILRNFYFINRQTGYLRN

SEQ ID NO: 617 - protein, 166 aa, Homo sapiens
  L160H
MSYNLLGFLQRSSNFQCQKLLWQLNGRLEYCLKDRMNFDIPEEIKQLQQFQKEDAALTIYEMLQNIFAIFRQDSSSTGWNETIVENLLANVYHQINHLKTVLEEKLEKEDFTRGKLMSSLHLKRYYGRILHYLKAKEYSHCAWTIVRVEILRNFYFINRHTGYLRN

SEQ ID NO: 618 - protein, 166 aa, Homo sapiens
  L160A
MSYNLLGFLQRSSNFQCQKLLWQLNGRLEYCLKDRMNFDIPEEIKQLQQFQKEDAALTIYEMLQNIFAIFRQDSSSTGWNETIVENLLANVYHQINHLKTVLEEKLEKEDFTRGKLMSSLHLKRYYGRILHYLKAKEYSHCAWTIVRVEILRNFYFINRATGYLRN

SEQ ID NO: 619 - protein, 166 aa, Homo sapiens
  L164T
MSYNLLGFLQRSSNFQCQKLLWQLNGRLEYCLKDRMNFDIPEEIKQLQQFQKEDAALTIYEMLQNIFAIFRQDSSSTGWNETIVENLLANVYHQINHLKTVLEEKLEKEDFTRGKLMSSLHLKRYYGRILHYLKAKEYSHCAWTIVRVEILRNFYFINRLTGYTRN

SEQ ID NO: 620 - protein, 166 aa, Homo sapiens
  L164Q
MSYNLLGFLQRSSNFQCQKLLWQLNGRLEYCLKDRMNFDIPEEIKQLQQFQKEDAALTIYEMLQNIFAIFRQDSSSTGWNETIVENLLANVYHQINHLKTVLEEKLEKEDFTRGKLMSSLHLKRYYGRILHYLKAKEYSHCAWTIVRVEILRNFYFINRLTGYQRN

SEQ ID NO: 621 - protein, 166 aa, Homo sapiens
  L164H
MSYNLLGFLQRSSNFQCQKLLWQLNGRLEYCLKDRMNFDIPEEIKQLQQFQKEDAALTIYEMLQNIFAIFRQDSSSTGWNETIVENLLANVYHQINHLKTVLEEKLEKEDFTRGKLMSSLHLKRYYGRILHYLKAKEYSHCAWTIVRVEILRNFYFINRLTGYHRN

SEQ ID NO: 622 - protein, 166 aa, Homo sapiens
  L164A
MSYNLLGFLQRSSNFQCQKLLWQLNGRLEYCLKDRMNFDIPEEIKQLQQFQKEDAALTIYEMLQNIFAIFRQDSSSTGWNETIVENLLANVYHQINHLKTVLEEKLEKEDFTRGKLMSSLHLKRYYGRILHYLKAKEYSHCAWTIVRVEILRNFYFINRLTGYARN

SEQ ID NO: 623 - protein, 166 aa, Homo sapiens
  Q18H
MSYNLLGFLQRSSNFQCHKLLWQLNGRLEYCLKDRMNFDIPEEIKQLQQFQKEDAALTIYEMLQNIFAIFRQDSSSTGWNETIVENLLANVYHQINHLKTVLEEKLEKEDFTRGKLMSSLHLKRYYGRILHYLKAKEYSHCAWTIVRVEILRNFYFINRLTGYLRN

SEQ ID NO: 624 - protein, 166 aa, Homo sapiens
  Q18S
MSYNLLGFLQRSSNFQCSKLLWQLNGRLEYCLKDRMNFDIPEEIKQLQQFQKEDAALTIYEMLQNIFAIFRQDSSSTGWNETIVENLLANVYHQINHLKTVLEEKLEKEDFTRGKLMSSLHLKRYYGRILHYLKAKEYSHCAWTIVRVEILRNFYFINRLTGYLRN

SEQ ID NO: 625 - protein, 166 aa, Homo sapiens
  Q18T
MSYNLLGFLQRSSNFQCTKLLWQLNGRLEYCLKDRMNFDIPEEIKQLQQFQKEDAALTIYEMLQNIFAIFRQDSSSTGWNETIVENLLANVYHQINHLKTVLEEKLEKEDFTRGKLMSSLHLKRYYGRILHYLKAKEYSHCAWTIVRVEILRNFYFINRLTGYLRN

SEQ ID NO: 626 - protein, 166 aa, Homo sapiens
  Q18N
MSYNLLGFLQRSSNFQCNKLLWQLNGRLEYCLKDRMNFDIPEEIKQLQQFQKEDAALTIYEMLQNIFAIFRQDSSSTGWNETIVENLLANVYHQINHLKTVLEEKLEKEDFTRGKLMSSLHLKRYYGRILHYLKAKEYSHCAWTIVRVEILRNFYFINRLTGYLRN

SEQ ID NO: 627 - protein, 166 aa, Homo sapiens
  Q23H
MSYNLLGFLQRSSNFQCQKLLWHLNGRLEYCLKDRMNFDIPEEIKQLQQFQKEDAALTIYEMLQNIFAIFRQDSSSTGWNETIVENLLANVYHQINHLKTVLEEKLEKEDFTRGKLMSSLHLKRYYGRILHYLKAKEYSHCAWTIVRVEILRNFYFINRLTGYLRN

SEQ ID NO: 628 - protein, 166 aa, Homo sapiens
  Q23S
MSYNLLGFLQRSSNFQCQKLLWSLNGRLEYCLKDRMNFDIPEEIKQLQQFQKEDAALTIYEMLQNIFAIFRQDSSSTGWNETIVENLLANVYHQINHLKTVLEEKLEKEDFTRGKLMSSLHLKRYYGRILHYLKAKEYSHCAWTIVRVEILRNFYFINRLTGYLRN

SEQ ID NO: 629 - protein, 166 aa, Homo sapiens
  Q23T
MSYNLLGFLQRSSNFQCQKLLWTLNGRLEYCLKDRMNFDIPEEIKQLQQFQKEDAALTIYEMLQNIFAIFRQDSSSTGWNETIVENLLANVYHQINHLKTVLEEKLEKEDFTRGKLMSSLHLKRYYGRILHYLKAKEYSHCAWTIVRVEILRNFYFINRLTGYLRN

SEQ ID NO: 630 - protein, 166 aa, Homo sapiens
  Q23N
MSYNLLGFLQRSSNFQCQKLLWNLNGRLEYCLKDRMNFDIPEEIKQLQQFQKEDAALTIYEMLQNIFAIFRQDSSSTGWNETIVENLLANVYHQINHLKTVLEEKLEKEDFTRGKLMSSLHLKRYYGRILHYLKAKEYSHCAWTIVRVEILRNFYFINRLTGYLRN

SEQ ID NO: 631 - protein, 166 aa, Homo sapiens
  Q48H
MSYNLLGFLQRSSNFQCQKLLWQLNGRLEYCLKDRMNFDIPEEIKQLHQFQKEDAALTIYEMLQNIFAIFRQDSSSTGWNETIVENLLANVYHQINHLKTVLEEKLEKEDFTRGKLMSSLHLKRYYGRILHYLKAKEYSHCAWTIVRVEILRNFYFINRLTGYLRN

SEQ ID NO: 632 - protein, 166 aa, Homo sapiens
  Q48S
MSYNLLGFLQRSSNFQCQKLLWQLNGRLEYCLKDRMNFDIPEEIKQLSQFQKEDAALTIYEMLQNIFAIFRQDSSSTGWNETIVENLLANVYHQINHLKTVLEEKLEKEDFTRGKLMSSLHLKRYYGRILHYLKAKEYSHCAWTIVRVEILRNFYFINRLTGYLRN

SEQ ID NO: 633 - protein, 166 aa, Homo sapiens
  Q48T
MSYNLLGFLQRSSNFQCQKLLWQLNGRLEYCLKDRMNFDIPEEIKQLTQFQKEDAALTIYEMLQNIFAIFRQDSSSTGWNETIVENLLANVYHQINHLKTVLEEKLEKEDFTRGKLMSSLHLKRYYGRILHYLKAKEYSHCAWTIVRVEILRNFYFINRLTGYLRN

SEQ ID NO: 634 - protein, 166 aa, Homo sapiens
  Q48N
MSYNLLGFLQRSSNFQCQKLLWQLNGRLEYCLKDRMNFDIPEEIKQLNQFQKEDAALTIYEMLQNIFAIFRQDSSSTGWNETIVENLLANVYHQINHLKTVLEEKLEKEDFTRGKLMSSLHLKRYYGRILHYLKAKEYSHCAWTIVRVEILRNFYFINRLTGYLRN

SEQ ID NO: 635 - protein, 166 aa, Homo sapiens
  Q49H
MSYNLLGFLQRSSNFQCQKLLWQLNGRLEYCLKDRMNFDIPEEIKQLQHFQKEDAALTIYEMLQNIFAIFRQDSSSTGWNETIVENLLANVYHQINHLKTVLEEKLEKEDFTRGKLMSSLHLKRYYGRILHYLKAKEYSHCAWTIVRVEILRNFYFINRLTGYLRN

SEQ ID NO: 636 - protein, 166 aa, Homo sapiens
  Q49S
MSYNLLGFLQRSSNFQCQKLLWQLNGRLEYCLKDRMNFDIPEEIKQLQSFQKEDAALTIYEMLQNIFAIFRQDSSSTGWNETIVENLLANVYHQINHLKTVLEEKLEKEDFTRGKLMSSLHLKRYYGRILHYLKAKEYSHCAWTIVRVEILRNFYFINRLTGYLRN

SEQ ID NO: 637 - protein, 166 aa, Homo sapiens
  Q49T
MSYNLLGFLQRSSNFQCQKLLWQLNGRLEYCLKDRMNFDIPEEIKQLQTFQKEDAALTIYEMLQNIFAIFRQDSSSTGWNETIVENLLANVYHQINHLKTVLEEKLEKEDFTRGKLMSSLHLKRYYGRILHYLKAKEYSHCAWTIVRVEILRNFYFINRLTGYLRN

SEQ ID NO: 638 - protein, 166 aa, Homo sapiens
  Q49N
MSYNLLGFLQRSSNFQCQKLLWQLNGRLEYCLKDRMNFDIPEEIKQLQNFQKEDAALTIYEMLQNIFAIFRQDSSSTGWNETIVENLLANVYHQINHLKTVLEEKLEKEDFTRGKLMSSLHLKRYYGRILHYLKAKEYSHCAWTIVRVEILRNFYFINRLTGYLRN

SEQ ID NO: 639 - protein, 166 aa, Homo sapiens
  Q51H
MSYNLLGFLQRSSNFQCQKLLWQLNGRLEYCLKDRMNFDIPEEIKQLQQFHKEDAALTIYEMLQNIFAIFRQDSSSTGWNETIVENLLANVYHQINHLKTVLEEKLEKEDFTRGKLMSSLHLKRYYGRILHYLKAKEYSHCAWTIVRVEILRNFYFINRLTGYLRN

SEQ ID NO: 640 - protein, 166 aa, Homo sapiens
  Q51S
MSYNLLGFLQRSSNFQCQKLLWQLNGRLEYCLKDRMNFDIPEEIKQLQQFSKEDAALTIYEMLQNIFAIFRQDSSSTGWNETIVENLLANVYHQINHLKTVLEEKLEKEDFTRGKLMSSLHLKRYYGRILHYLKAKEYSHCAWTIVRVEILRNFYFINRLTGYLRN

SEQ ID NO: 641 - protein, 166 aa, Homo sapiens
  Q51T
MSYNLLGFLQRSSNFQCQKLLWQLNGRLEYCLKDRMNFDIPEEIKQLQQFTKEDAALTIYEMLQNIFAIFRQDSSSTGWNETIVENLLANVYHQINHLKTVLEEKLEKEDFTRGKLMSSLHLKRYYGRILHYLKAKEYSHCAWTIVRVEILRNFYFINRLTGYLRN

SEQ ID NO: 642 - protein, 166 aa, Homo sapiens
  Q51N
MSYNLLGFLQRSSNFQCQKLLWQLNGRLEYCLKDRMNFDIPEEIKQLQQFNKEDAALTIYEMLQNIFAIFRQDSSSTGWNETIVENLLANVYHQINHLKTVLEEKLEKEDFTRGKLMSSLHLKRYYGRILHYLKAKEYSHCAWTIVRVEILRNFYFINRLTGYLRN

SEQ ID NO: 643 - protein, 166 aa, Homo sapiens
  Q64H
MSYNLLGFLQRSSNFQCQKLLWQLNGRLEYCLKDRMNFDIPEEIKQLQQFQKEDAALTIYEMLHNIFAIFRQDSSSTGWNETIVENLLANVYHQINHLKTVLEEKLEKEDFTRGKLMSSLHLKRYYGRILHYLKAKEYSHCAWTIVRVEILRNFYFINRLTGYLRN

SEQ ID NO: 644 - protein, 166 aa, Homo sapiens
  Q64S
MSYNLLGFLQRSSNFQCQKLLWQLNGRLEYCLKDRMNFDIPEEIKQLQQFQKEDAALTIYEMLSNIFAIFRQDSSSTGWNETIVENLLANVYHQINHLKTVLEEKLEKEDFTRGKLMSSLHLKRYYGRILHYLKAKEYSHCAWTIVRVEILRNFYFINRLTGYLRN

SEQ ID NO: 645 - protein, 166 aa, Homo sapiens
  Q64T
MSYNLLGFLQRSSNFQCQKLLWQLNGRLEYCLKDRMNFDIPEEIKQLQQFQKEDAALTIYEMLTNIFAIFRQDSSSTGWNETIVENLLANVYHQINHLKTVLEEKLEKEDFTRGKLMSSLHLKRYYGRILHYLKAKEYSHCAWTIVRVEILRNFYFINRLTGYLRN

SEQ ID NO: 646 - protein, 166 aa, Homo sapiens
  Q64N
MSYNLLGFLQRSSNFQCQKLLWQLNGRLEYCLKDRMNFDIPEEIKQLQQFQKEDAALTIYEMLNNIFAIFRQDSSSTGWNETIVENLLANVYHQINHLKTVLEEKLEKEDFTRGKLMSSLHLKRYYGRILHYLKAKEYSHCAWTIVRVEILRNFYFINRLTGYLRN

SEQ ID NO: 647 - protein, 166 aa, Homo sapiens
  Q72H
MSYNLLGFLQRSSNFQCQKLLWQLNGRLEYCLKDRMNFDIPEEIKQLQQFQKEDAALTIYEMLQNIFAIFRHDSSSTGWNETIVENLLANVYHQINHLKTVLEEKLEKEDFTRGKLMSSLHLKRYYGRILHYLKAKEYSHCAWTIVRVEILRNFYFINRLTGYLRN

SEQ ID NO: 648 - protein, 166 aa, Homo sapiens
  Q72S
MSYNLLGFLQRSSNFQCQKLLWQLNGRLEYCLKDRMNFDIPEEIKQLQQFQKEDAALTIYEMLQNIFAIFRSDSSSTGWNETIVENLLANVYHQINHLKTVLEEKLEKEDFTRGKLMSSLHLKRYYGRILHYLKAKEYSHCAWTIVRVEILRNFYFINRLTGYLRN

SEQ ID NO: 649 - protein, 166 aa, Homo sapiens
  Q72T
MSYNLLGFLQRSSNFQCQKLLWQLNGRLEYCLKDRMNFDIPEEIKQLQQFQKEDAALTIYEMLQNIFAIFRTDSSSTGWNETIVENLLANVYHQINHLKTVLEEKLEKEDFTRGKLMSSLHLKRYYGRILHYLKAKEYSHCAWTIVRVEILRNFYFINRLTGYLRN

SEQ ID NO: 650 - protein, 166 aa, Homo sapiens
  Q72N
MSYNLLGFLQRSSNFQCQKLLWQLNGRLEYCLKDRMNFDIPEEIKQLQQFQKEDAALTIYEMLQNIFAIFRNDSSSTGWNETIVENLLANVYHQINHLKTVLEEKLEKEDFTRGKLMSSLHLKRYYGRILHYLKAKEYSHCAWTIVRVEILRNFYFINRLTGYLRN

SEQ ID NO: 651 - protein, 166 aa, Homo sapiens
  M1C
CSYNLLGFLQRSSNFQCQKLLWQLNGRLEYCLKDRMNFDIPEEIKQLQQFQKEDAALTIYEMLQNIFAIFRQDSSSTGWNETIVENLLANVYHQINHLKTVLEEKLEKEDFTRGKLMSSLHLKRYYGRILHYLKAKEYSHCAWTIVRVEILRNFYFINRLTGYLRN

SEQ ID NO: 652 - protein, 166 aa, Homo sapiens
  L6C
MSYNLCGFLQRSSNFQCQKLLWQLNGRLEYCLKDRMNFDIPEEIKQLQQFQKEDAALTIYEMLQNIFAIFRQDSSSTGWNETIVENLLANVYHQINHLKTVLEEKLEKEDFTRGKLMSSLHLKRYYGRILHYLKAKEYSHCAWTIVRVEILRNFYFINRLTGYLRN

SEQ ID NO: 653 - protein, 166 aa, Homo sapiens
  Q10C
MSYNLLGFLCRSSNFQCQKLLWQLNGRLEYCLKDRMNFDIPEEIKQLQQFQKEDAALTIYEMLQNIFAIFRQDSSSTGWNETIVENLLANVYHQINHLKTVLEEKLEKEDFTRGKLMSSLHLKRYYGRILHYLKAKEYSHCAWTIVRVEILRNFYFINRLTGYLRN

SEQ ID NO: 654 - protein, 166 aa, Homo sapiens
  S13C
MSYNLLGFLQRSCNFQCQKLLWQLNGRLEYCLKDRMNFDIPEEIKQLQQFQKEDAALTIYEMLQNIFAIFRQDSSSTGWNETIVENLLANVYHQINHLKTVLEEKLEKEDFTRGKLMSSLHLKRYYGRILHYLKAKEYSHCAWTIVRVEILRNFYFINRLTGYLRN

SEQ ID NO: 655 - protein, 166 aa, Homo sapiens
  Q16C
MSYNLLGFLQRSSNFCCQKLLWQLNGRLEYCLKDRMNFDIPEEIKQLQQFQKEDAALTIYEMLQNIFAIFRQDSSSTGWNETIVENLLANVYHQINHLKTVLEEKLEKEDFTRGKLMSSLHLKRYYGRILHYLKAKEYSHCAWTIVRVEILRNFYFINRLTGYLRN

SEQ ID NO: 656 - protein, 166 aa, Homo sapiens
  Q94C
MSYNLLGFLQRSSNFQCQKLLWQLNGRLEYCLKDRMNFDIPEEIKQLQQFQKEDAALTIYEMLQNIFAIFRQDSSSTGWNETIVENLLANVYHCINHLKTVLEEKLEKEDFTRGKLMSSLHLKRYYGRILHYLKAKEYSHCAWTIVRVEILRNFYFINRLTGYLRN

SEQ ID NO: 657 - protein, 166 aa, Homo sapiens
  H97C
MSYNLLGFLQRSSNFQCQKLLWQLNGRLEYCLKDRMNFDIPEEIKQLQQFQKEDAALTIYEMLQNIFAIFRQDSSSTGWNETIVENLLANVYHQINCLKTVLEEKLEKEDFTRGKLMSSLHLKRYYGRILHYLKAKEYSHCAWTIVRVEILRNFYFINRLTGYLRN

SEQ ID NO: 658 - protein, 166 aa, Homo sapiens
  L98C
MSYNLLGFLQRSSNFQCQKLLWQLNGRLEYCLKDRMNFDIPEEIKQLQQFQKEDAALTIYEMLQNIFAIFRQDSSSTGWNETIVENLLANVYHQINHCKTVLEEKLEKEDFTRGKLMSSLHLKRYYGRILHYLKAKEYSHCAWTIVRVEILRNFYFINRLTGYLRN

SEQ ID NO: 659 - protein, 166 aa, Homo sapiens
  V101C
MSYNLLGFLQRSSNFQCQKLLWQLNGRLEYCLKDRMNFDIPEEIKQLQQFQKEDAALTIYEMLQNIFAIFRQDSSSTGWNETIVENLLANVYHQINHLKTCLEEKLEKEDFTRGKLMSSLHLKRYYGRILHYLKAKEYSHCAWTIVRVEILRNFYFINRLTGYLRN

SEQ ID NO: 660 - DNA, 3736 bp, Artificial Sequence
  pNAUT IFNbeta
gcgcccaatacgcaaaccgcctctccccgcgcgttggccgattcattaatgcagctgctaggggttccttgtagttaatgattaacccgccatgctacttatctactatgccaagtacgccccctattgacgtcaatgacggtaaatggcccgcctggcattatgcccagtacatgaccttatgggactttcctacttggcagtacatctacgtattagtcatcgctattaccatggtgatgcggttttggcagtacatcaatgggcgtggatagcggtttgactcacggggatttccaagtctccaccccattgacgtcaatgggagtttgttttggcaccaaaatcaacgggactttccaaaatgtcgtaacaactccgccccattgacgcaaatgggcggtaggcgtgtacggtgggaggtctatataagcagagctctctggctaactagagaacccactgcttactggcttatcgaaattaatacgactcactatagggagacccaagcttatgaccaacaagtgtctcctccaaattgctctcctgttgtgcttctccactacagctctttccatgagctacaacttgcttggattcctacaaagaagcagcaattttcagtgtcagaagctcctgtggcaattgaatgggaggcttgaatattgcctcaaggacaggatgaactttgacatccctgaggagattaagcagctgcagcagttccagaaggaggacgccgcattgaccatctatgagatgctccagaacatctttgctattttcagacaagattcatctagcactggctggaatgagactattgttgagaacctcctggctaatgtctatcatcagataaaccatctgaagacagtcctggaagaaaaactggagaaagaagatttcaccaggggaaaactcatgagcagtctgcacctgaaaagatattatgggaggattctgcattacctgaaggccaaggagtacagtcactgtgcctggaccatagtcagagtggaaatcctaaggaacttttacttcattaacagacttacaggttacctccgaaactgatctagagggccctattctatagtgtcacctaaatgctagagctcgctgatcagcctcgactgtgccttctagttgccagccatctgttgtttgcccctcccccgtgccttccttgaccctggaaggtgccactcccactgtcctttcctaataaaatgaggaaattgcatcgcattgtctgagtaggtgtcattctattctggggggtggggtggggcaggacagcaagggggaggattgggaagacaatagcaggcatgctggggatgcggtgggctctatggcttctgaggcggaaagaaccaggtagataagtagcatggcgggttaatcattaactacacagctggcgtaatagcgaagaggcccgcaccgatcgcccttcccaacagttgcgcagcctgaatggcgaatggcgcctgatgcggtattttctccttacgcatctgtgcggtatttcacaccgcatatggtgcactctcagtacaatctgctctgatgccgcatagttaagccagccccgacacccgccaacacccgctgacgcgccctgacgggcttgtctgctcccggcatccgcttacagacaagctgtgaccgtctccgggagctgcatgtgtcagaggttttcaccgtcatcaccgaaacgcgcgagacgaaagggcctcgtgatacgcctatttttataggttaatgtcatgataataatggtttcttagacgtcaggtggcacttttcggggaaatgtgcgcggaacccctatttgtttatttttctaaatacattcaaatatgtatccgctcatgagacaataaccctgataaatgcttcaataatattgaaaaaggaagagtatgagtattcaacatttccgtgtcgcccttattcccttttttgcggcattttgccttcctgtttttgctcacccagaaacgctggtgaaagtaaaagatgctgaagatcagttgggtgcacgagtgggttacatcgaactggatctcaacagcggtaagatccttgagagttttcgccccgaagaacgttttccaatgatgagcacttttaaagttctgctatgtggcgcggtattatcccgtattgacgccgggcaagagcaactcggtcgccgcatacactattctcagaatgacttggttgagtactcaccagtcacagaaaagcatcttacggatggcatgacagtaagagaattatgcagtgctgccataaccatgagtgataacactgcggccaacttacttctgacaacgatcggaggaccgaaggagctaaccgcttttttgcacaacatgggggatcatgtaactcgccttgatcgttgggaaccggagctgaatgaagccataccaaacgacgagcgtgacaccacgatgcctgtagcaatggcaacaacgttgcgcaaactattaactggcgaactacttactctagcttcccggcaacaattaatagactggatggaggcggataaagttgcaggaccacttctgcgctcggcccttccggctggctggtttattgctgataaatctggagccggtgagcgtgggtctcgcggtatcattgcagcactggggccagatggtaagccctcccgtatcgtagttatctacacgacggggagtcaggcaactatggatgaacgaaatagacagatcgctgagataggtgcctcactgattaagcattggtaactgtcagaccaagtttactcatatatactttagattgatttaaaacttcatttttaatttaaaaggatctaggtgaagatcctttttgataatctcatgaccaaaatcccttaacgtgagttttcgttccactgagcgtcagaccccgtagaaaagatcaaaggatcttcttgagatcctttttttctgcgcgtaatctgctgcttgcaaacaaaaaaaccaccgctaccagcggtggtttgtttgccggatcaagagctaccaactctttttccgaaggtaactggcttcagcagagcgcagataccaaatactgtccttctagtgtagccgtagttaggccaccacttcaagaactctgtagcaccgcctacatacctcgctctgctaatcctgttaccagtggctgctgccagtggcgataagtcgtgtcttaccgggttggactcaagacgatagttaccggataaggcgcagcggtcgggctgaacggggggttcgtgcacacagcccagcttggagcgaacgacctacaccgaactgagatacctacagcgtgagctatgagaaagcgccacgcttcccgaagggagaaaggcggacaggtatccggtaagcggcagggtcggaacaggagagcgcacgagggagcttccagggggaaacgcctggtatctttatagtcctgtcgggtttcgccacctctgacttgagcgtcgatttttgtgatgctcgtcaggggggcggagcctatggaaaaacgccagcaacgcggcctttttacggttcctggccttttgctggccttttgctcacatgttctttcctgcgttatcccctgattctgtggataaccgtattaccgcctttgagtgagctgataccgctcgccgcagccgaacgaccgagcgcagcgagtcagtgagcgaggaagcggaaga

SEQ ID NO: 661 - DNA, 23 bp, Artificial Sequence
  Synthetic oligonucleotide Primer MxA-1
aaggaatgggaatcagtcatgag

SEQ ID NO: 662 - DNA, 25 bp, Artificial Sequence
  Synthetic oligonucleotide Primer MxA-2
tctattagagtcagatccgggacat

SEQ ID NO: 663 - DNA, 21 bp, Artificial Sequence
  Synthetic oligonucleotide Primer BR1-1
aggacgctgtctttgcatagg

SEQ ID NO: 664 - DNA, 27 bp, Artificial Sequence
  Synthetic oligonucleotide Primer BR1-2
acagttgttacttgggtacattatgga

SEQ ID NO: 665 - DNA, 25 bp, Artificial Sequence
  Synthetic oligonucleotide Primer P69OAS-1
atctcgtcgtgttccataactcact

SEQ ID NO: 666 - DNA, 24 bp, Artificial Sequence
  Synthetic oligonucleotide Primer P69OAS-2
gttcatggatttccttgacgattt

SEQ ID NO: 667 - DNA, 23 bp, Artificial Sequence
  Synthetic oligonucleotide Probe MxA sequence
tcaccctggagatcagctcccga

SEQ ID NO: 668 - DNA, 33 bp, Artificial Sequence
  Synthetic oligonucleotide Probe Beta-R1 sequence
aaaagcagtgaaagtggcagatattgagaaagc

SEQ ID NO: 669 - DNA, 26 bp, Artificial Sequence
  Synthetic oligonucleotide Probe 2'5' OAS p69 sequence
ctacacctcccaaaaaaacgagcggc

1. A modified IFN-β polypeptide, comprising:
one or more amino acid modifications in an unmodified IFN-β polypeptide, wherein:
the one or more amino acid modifications correspond to modifications selected from among Y3I, Y3H, L6I, L6V, L6H, L6A, R11D, Q18S, Q18N, Q18H, Q18T, K19N, L20I, L20V, L20H, L20A, L21I, L21V, L21T, L21Q, L21H, L21A, Q23H, Q23S, Q23T, Q23N, L24I, L24V, L24T, L24Q, L24H, L24A, E29N, K33N, D34N, D34Q, D34G, F38I, F38V, D39N, P41A, P41S, E42N, E43N, E43K, E43Q, E43H, K45D, K45N, Q48H, Q48S, Q48T, Q48N, Q49H, Q49S, Q49T, Q49N, F50I, F50V, Q51H, Q51S, Q51T, Q51N, K52D, K52N, E53N, E53R, E53Q, E53H, D54K, D54N, D54G, D54Q, L57I, L57T, L57Q, L57H, Y60I, Y60H, E61K, E61H, E61N, E61Q, M62I, M62V, M62T, M62Q, L63I, L63V, L63T, L63Q, L63H, L63A, Q64H, Q64S, Q64T, Q64N, F70I, F70V, Q72H, Q72S, Q72T, Q72N, D73N, W79H, W79S, E81K, E81N, E85N, E85K, L87I, L87V, L87H, L87A, L88I, L88V, L88T, L88Q, L88H, L88A, L98I, L98V, L98H, L98A, K99N, L102I, L102V, L102T, L102Q, L102H, L102A, E103N, E103K, E104N, E104R, K105D, K105N, L106I, L106V, L106T, L106Q, L106H, L106A, E107N, E107R, K108D, K108N, E109R, E109N, D110K, D110N, R113E, K115D, K115N, K115S, K115H, K115Q, M117I, M117V, M117T, M117Q, M117A, L122I, L122V, L122T, L122Q, L122H, L122A, K123N, R124D, R124E, Y125I, Y125H, Y126I, Y126H, Y132I, Y132H, L133I, L133V, L133T, L133Q, L133H, L133A, K134N, K136N, E137N, W143H, W143S, R147H, R147Q, E149H, E149N, E149Q, L151I, L151V, L151T, L151Q, L511H, L151A, R152D, F154V, F154I, F156I, L160I, L160V, L160T, L160Q, L160H, L160A, L164I, L164V, L164T, L164Q, L164H, L164A, and R165D in the mature IFN-β polypeptide set forth in SEQ ID NO:1.

2. A modified IFN-β polypeptide of claim 1, wherein the one or more amino acid modifications correspond to modifications selected from among Y3I, Q18S, Q18N, K19N, L20I, L20V, K33N, D34N, P41A, P41S, E42N, E43N, K45D, K45N, Q48H, Q48S, Q48T, Q49H, Q49S, Q49T, F50I, F50V, Q51H, Q51S, Q51T, Q51N, K52D, K52N, E53N, D54K, D54N, D54G, L57I, Y60I, E61K, E61H, E61N, L63I, Q64H, Q64S, Q64T, F70I, F70V, Q72H, Q72S, E85N, L88I, L88V, L98I, L98V, K99N, E103N, E104N, K105D, K105N, L106I, L106V, E107N, E109N, K115D, K115N, K115S, K115H, K123N, Y125I, Y126I, Y132I, K134N, K136N, R147H, R147Q, E149H, E149N, L151I, and F154V in the mature IFN-β polypeptide set forth in SEQ ID NO:1.

3. The modified IFN-β polypeptide of claim 1 that retains at least one in vivo activity of an IFN-β polypeptide.

4. The modified IFN-β polypeptide of claim 1 that has 1, 2, 3, 4, 5, 6, 7, 8, 9, 10, 11, 12, 13, 14, 15, 16, 17, 18, 19 or 20 amino acid modifications.

5. The modified IFN-β polypeptide of claim 1, that is a mature polypeptide.

6. The modified IFN-β polypeptide of claim 1, that is a precursor polypeptide.

7. A modified IFN-β polypeptide of claim 1, wherein the unmodified IFN-β polypeptide comprises the sequence of amino acids set forth in SEQ ID NO:1 or SEQ ID NO:3.

8. A modified IFN-β polypeptide of claim 1, comprising:
one or more amino acid modifications in an unmodified IFN-β polypeptide comprising the sequence of amino acids set forth in SEQ ID NO:3, wherein:
the one or more amino acid modifications correspond to modifications selected from among Y3I, Q18S, Q18N, K19N, L20I, L20V, L21I, L21V, K33N, D34N, P41A, P41S, E42N, E43N, K45D, K45N, Q48H, Q48S, Q48T, Q49H, Q49S, Q49T, F50I, F50V, Q51H, Q51S, Q51T, Q51N, K52D, K52N, E53N, D54K, D54N, D54G, L57I, Y60I, E61K, E61H, E61N, M62I, M62V, Q64H, Q64S, Q64T, F70I, F70V, Q72H, Q72S, E85N, L88I, L88V, L98I, L98V, K99N, E103N, E104N, K105D, K105N, L106I, L106V, E107N, E109N, K115D, K115N, K115S, K115H, M117I, M117V, L122I, L122V, K123N, Y125I, Y126I, Y132I, K134N, Y136N, R147H, R147Q, E149H, E149N, L151I, L154V, and L160V in the mature IFN-β polypeptide set forth in SEQ ID NO:1.

9. A modified IFN-β polypeptide of claim 1, wherein the unmodified IFN-polypeptide is an allelic or species variant of the polypeptide whose sequence is set forth in SEQ ID NO:1.

10. The modified IFN-β polypeptide of claim 9, wherein the allelic or species variant has 40%, 50%, 60%, 70%, 80%, 90%, 91%, 92%, 93%, 94%, 95%, 96%, 97%, 98%, or 99% sequence identity to the polypeptide whose sequence is set forth in SEQ ID NO:1 excluding the one or more amino acid modification(s).

11. A modified IFN-β polypeptide of claim 1, comprising a sequence of amino acids set forth in any one of SEQ ID NOS: 4-68, 71-82, 84-87, 134-153, 519, 520, 534-557, 559, 560, 562-564, 566-606 and 608-650.

12. A modified IFN-β polypeptide of claim 1, wherein only the primary sequence is modified and the polypeptide exhibits increased protein stability.

13. A modified IFN-β polypeptide of claim 1, wherein the polypeptide:
comprises only one amino acid modification; and
exhibits increased protein stability.

14. A modified IFN-β polypeptide of claim 1 that exhibits increased protease resistance or increased conformational stability or a combination thereof compared to the unmodified IFN-β polypeptide and retains one or more activities of the unmodified IFN-β polypeptide.

15. The modified IFN-β polypeptide of claim 14 that exhibits increased protease resistance.

16. A modified IFN-β polypeptide of claim 14 wherein:
the one or more amino acid modifications correspond to modifications selected from among Y3H, Y3I, L6I, L6V, L6H, L6A, K19N, Q18S, Q18N, Q18H, Q18T, L20I, L20V, L20H, L20A, L21I, L21V, L21T, L21Q, L21H, L21A, Q23H, Q23S, Q23T, Q23N, L24I, L24V, L24T, L24Q, L24H, L24A, K33N, E29N, D34N, D34Q, D34G, F38I, F38V, D39N, P41A, P41S, E42N, E43Q, E43H, E43N, K45N, Q48N, Q48H, Q48S, Q48T, Q49N, Q49H, Q49S, Q49T, F50I, F50V, Q51H, Q51S, Q51T, Q51N, K52N, E53N, E53Q, E53H, D54N, D54Q, D54G, L57I, L57V, L57T, L57Q, L57H, Y60I, Y60H, E61H, E61N, E61Q, M62I, M62V, M62T, M62Q, L63I, L63V, L63T, L63Q, L63H, Q64N, Q64H, Q64S, Q64T, F70I, F70V, Q72H, Q72S, Q72T, Q72N, D73N, W79H, W79S, E81N, E85N, L87I, L87V, L87H, L87A, L88I, L88V, L88T, L88Q, L88H, L88A, L98I, L98V, L98H, L98A, K99N, L102I, L102V, L102T, L102Q, L102H, L102A, E103N, E104N, K105N, L106I, L106V, L106T, L106Q, L106H, L106A, E107N, K108N, E109N, D110N, K115N, K115S, K115H, K115Q, M117I, M117V, M117T, M117Q, M117A, L122I, L122V, L122T, L122Q, L122H, L122A, K123N, Y125I, Y125H, Y126I, Y126H, Y132I, Y132H, L133I, L133V, L133T, L133Q, L133H, K134N, K136N, E137N, W143H, W143S, R147H, R147Q, E149H, E149N, E149Q, L151I, L151V, L151T, L151Q, L151H, L151A, F154I, F154V, F156I, L160I, L160V, L160T, L160Q, L160H, L160A, L164T, L164Q, L164H, L164A, L164I, and L164V in the mature IFN-β polypeptide set forth in SEQ ID NO:1.

17. A modified IFN-β polypeptide of claim 14, wherein the polypeptide exhibits increased resistance to one or more proteases selected from among pepsin, trypsin, chymotrypsin, elastase, aminopeptidase, gelatinase B, gelatinase A, α-chymotrypsin, carboxypeptidase, endoproteinase Arg-C, endoproteinase Asp-N, endoproteinase Glu-C, endoproteinase Lys-C, luminal pepsin, microvillar endopeptidase, dipeptidyl peptidase, enteropeptidase, hydrolase, NS3, factor Xa, Granzyme B, thrombin, plasmin, urokinase, tPA and PSA.

18. A modified IFN-β polypeptide of claim 17, wherein the protease is gelatinase B and the amino acid modification is at positions containing any one or more of an amino acid selected from among Phenylalanine (F), Leucine (L), Glutamic Acid (E), Tyrosine (Y), and Glutamine (Q).

19. A modified IFN-β polypeptide of claim 18, wherein:
the one or more amino acid modifications correspond to modifications selected from among Y3I, Y3H, L6I, L6V, L6H, L6A, Q18S, Q18N, Q18H, Q18T, L20I, L20V, L20H, L20A, L21I, L21V, L21T, L21Q, L21H, L21A, Q23H, Q23S, Q23T, Q23N, L24I, L24V, L24T, L24Q, L24H, L24A, E29N, F38I, F38V, E42N, E43N, E43Q, E43H, Q48H, Q48S, Q48T, Q48N, Q49H, Q49S, Q49T, Q49N, F50I, F50V, Q51H, Q51S, Q51T, Q51N, E53Q, E53H, E53N, L57I, L57V, L57T, L57Q, L57H, Y60H, Y60I, E61H, E61N, E61Q, L63I, L63V, L63T, L63Q, L63H, Q64H, Q64S, Q64T, Q64N, F70I, F70V, Q72H, Q72S, Q72T, Q72N, E81N, E85N, L87I, L87V, L87H, L87A, L88I, L88V, L88T, L88Q, L88H, L88A, L98I, L98V, L98H, L98A, L102I, L102V, L102T, L102Q, L102H, L102A, E103N, E104N, L106I, L106V, L106T, L106Q, L106H, L106A, E107N, E109N, Y125I, Y125H, Y126I, Y126H, Y132I, Y132H, L133I, L133V, L133T, L133Q, L133H, E137N, E149H, E149N, E149Q, L151I, L151V, L151T, L151Q, L151H, L151A, F154I, F154V, F156I, L160I, L160V, L160T, L160Q, L160H, L160A, L164I, L164V, L164H, L164A, L164T, and L164Q in the mature IFN-β polypeptide set forth in SEQ ID NO:1.

20. A modified IFN-β polypeptide of claim 14 that exhibits increased conformational stability, wherein:
the one or more amino acid modifications correspond to modifications selected from among R11D, E43K, K45D, K52D, E53R, D54K, E61K, E81K, E85K, E103K, E104R, K105D, E107R, E109R, D110K, R113E, K115Q, K15D, R124D, R124E, R152D, and R165D.

21. A modified IFN-β polypeptide of claim 14, wherein:
the one or more amino acid modifications increase the isoelectric point of the polypeptide; and
the amino acid modification is replacement by one or more amino acid residues selected from among a Glutamic Acid (E) or an Aspartic Acid (D) to a Lysine (K) or to an Arginine (R); or
the one or more amino acid modifications decrease the isoelectric point of the polypeptide; and
the one or more amino acid modification(s) is replacement by one or more amino acid residues selected from among a Lysine (K) or an Arginine (R) to a Glutamine (Q), to a Glutamic Acid (E) or to an Aspartic Acid (D).

22. A modified IFN-β polypeptide of claim 21 wherein:
the one or more amino acid modifications increase the isoelectric point; and
the one or more amino acid modifications correspond to modifications selected from among E43K, E53R, D54K, E61K, E81K, E85K, E103K, E104R, E107R, E109R, and D110K in the mature IFN-β polypeptide set forth in SEQ ID NO:1.

23. A modified IFN-β polypeptide of claim 21, wherein:
the one or more amino acid modifications decrease the isoelectric point; and
the one or more amino acid modifications correspond to modifications selected from among K115Q, R11D, K45D, K52D, K105D, K108D, R113E, K115D, R124D, R124E, R152D, and R165D in the mature IFN-β polypeptide set forth in SEQ ID NO:1.

24. A modified IFN-β polypeptide of claim 1, comprising one or more further amino acid modification(s) at one or more positions corresponding to amino acid positions selected from among M1, Y3, L5, L6, F8, L9, Q10, R11, S12, S13, N14, F15, Q16, C17, Q18, K19, L20, L21, W22, Q23, L24, N25, R27, L28, E29, Y30, L32, K33, D34, R35, M36, F38, D39, E42, E43, K45, L47, Q48, Q49, K52, E53, D54, L57, Y60, E61, M62, L63, Q64, F67, R71, Q72, D73, G78, W79, N80, E81, T82, I83, E85, N86, L87, L88, A89, N90, V91, Y92, Q94, I95, H97, L98, K99, V101, L102, E103, E104, K105, L106, E107, K108, E109, D110, F111, R113, K115, L116, M117, L120, L122, K123, R124, Y125, Y126, R128, L130, Y132, L133, K134, N136, E137, Y138, W143, E149, L151, R152, F154, Y155, F156, R159, L160, Y163, L164, and R165 in the mature IFN-β polypeptide set forth in SEQ ID NO:1.

25. A modified IFN-β polypeptide of claim 24, wherein the one or more further amino acid modification(s) correspond to modifications selected from among M1C, M1D, M1E, M1K, M1N, M1R, M1S, M1V, M1I, M1T, M1A, M1Q, Y3H, L5V, L5I, L5T, L5Q, L5H, L5A, L5D, L5E, L5K, L5R, L5N, L5S, L6I, L6V, L6H, L6A, L6D, L6E, L6K, L6N, L6Q, L6R, L6S, L6T, L6C, F8I, F8V, F8D, F8E, F8K, F8R, L9V, L9I, L9T, L9Q, L9H, L9A, L9D, L9E, L9K, L9N, L9R, L9S, Q10D, Q10E, Q10K, Q10N, Q10R, Q10S, Q10T, Q10C, R11D, R11H, R11Q, S12D, S12E, S12K, S12R, S13D, S13E, S13K, S13N, S13Q, S13R, S13T, S13C, N14D, N14E, N14K, N14Q, N14R, N14S, N14T, F15D, F15E, F15K, F15R, F15I, F15V, Q16D, Q16E, Q16K, Q16N, Q16R, Q16S, Q16C, Q16T, C17D, C17E, C17K, C17N, C17Q, C17R, C17S, C17T, Q18H, Q18T, K19Q, K19T, K19S, K19H, L20H, L20A, L20N, L20Q, L20R, L20S, L20T, L20D, L20E, L20K, L21I, L21V, L21T, L21Q, L21H, L21A, W22D, W22E, W22K, W22R, W22S, W22H, Q23H, Q23S, Q23T, Q23N, Q23D, Q23E, Q23K, Q23R, L24I, L24V, L24T, L24Q, L24H, L24A, L24D, L24E, L24K, L24R, N25H, N25S, N25Q, R27H, R27Q, L28V, L28I, L28T, L28Q, L28H, L28A, E29N, E29Q, E29H, Y30H, Y30I, L32V, L32I, L32T, L32Q, L32H, L32A, K33Q, K33T, K33S, K33H, D34Q, D34G, R35H, R35Q, M36V, M36I, M36T, M36Q, M36A, F38I, F38V, D39N, D39Q, D39H, D39G, E42Q, E42H, E43K, E43Q, E43H, K45Q, K45T, K45S, K45H, L47V, L47I, L47T, L47Q, L47H, L47A, Q48N, Q49N, K52Q, K52T, K52S, K52H, E53R, E53Q, E53H, D54Q, L57V, L57T, L57Q, L57H, L57A, Y60H, E61Q, M62I, M62V, M62T, M62Q, M62A, L63V, L63T, L63Q, L63H, L63A, Q64N, F67I, F67V, R71H, R71Q, Q72N, D73N, D73H, D73G, D73Q, G78D, G78E, G78K, G78R, W79H, W79S, W79D, W79E, W79K, W79R, N80D, N80E, N80K, N80R, E81K, E81N, E81Q, E81H, T82D, T82E, T82K, T82R, I83D, I83E, I83K, I83R, I83N, I83Q, I83S, I83T, E85K, E85Q, E85H, N86D, N86E, N86K, N86R, N86Q, N86S, N86T, L87I, L87V, L87H, L87A, L87D, L87E, L87K, L87R, L87N, L87Q, L87S, L87T, L88T, L88Q, L88H, L88A, A89D, A89E, A89K, A89R, N90D, N90E, N90K, N90Q, N90R, N90S, N90T, N90C, V91D, V91E, V91K, V91N, V91Q, V91R, V91S, V91T, V91C, Y92H, Y92I, Q94D, Q94E, Q94K, Q94N, Q94R, Q94S, Q94T, Q94C, I95D, I95E, I95K, I95N, I95Q, I95R, I95S, I95T, H97D, H97E, H97K, H97N, H97Q, H97R, H97S, H97T, H97C, L98H, L98A, L98D, L98E, L98K, L98N, L98Q, L98R, L98S, L98T, L98C, K99Q, K99T, K99S, K99H, V101D, V101E, V101K, V101N, V101Q, V101R, V101S, V101T, V101C, L102I, L102V, L102T, L102Q, L102H, L102A, E103K, E103Q, E103H, E104R, E104Q, E104H, K105Q, K105T, K105S, K105H, L106T, L106Q, L106H, L106A, E107R, E107Q, E107H, K108D, K108N, K108Q, K108T, K108S, K108H, E109R, E109Q, E109H, D110K, D110N, D110Q, D110H, D110G, F111I, F111V, R113E, R113H, R113Q, K115Q, L116V, L116I, L116T, L116Q, L116H, L116A, M117I, M117V, M117T, M117Q, M117Q, M117A, L120V, L120I, L120T, L120Q, L120H, L120A, L122I, L122V, L122T, L122Q, L122H, L122A, K123Q, K123T, K123S, K123H, R124D, R124E, R124H, R124Q, Y125H, Y126H, R128H, R128Q, L130V, L130I, L130T, L130Q, L130H, L130A, Y132H, L133I, L133V, L133T, L133Q, L133H, L133A, K134Q, K134T, K134S, K134H, K136Q, K136T, K136S, K136H, E137N, E137Q, E137H, Y138H, Y138I, W143H, W143S, E149Q, L151V, L151T, L151Q, L151H, L151A, R152D, R152H, R152Q, F154I, Y155H, Y155I, F156I, F156V, R159H, R159Q, L160I, L160V, L160T, L160Q, L160H, L160A, Y163H, Y163I, L164I, L164V, L164T, L164Q, L164H, L164A, R165D, R165Q and R165H in the mature IFN-β polypeptide set forth in SEQ ID NO:1.

26. A modified IFN-β polypeptide of claim 24, wherein the one or more further amino acid modification(s) at one or more positions corresponding to amino acid positions is selected from among M1, Y3, L5, L6, F8, L9, Q10, R11, S12, S13, N14, F15, Q16, C17, Q18, K19, L20, L21, W22, Q23, L24, N25, R27, L28, E29, Y30, L32, K33, D34, R35, M36, F38, D39, E42, E43, K45, L47, Q48, Q49, K52, E53, D54, L57, Y60, E61, M62, L63, Q64, F67, R71, Q72, D73, G78, W79, N80, E81, T82, I83, E85, N86, L87, L88, A89, N90, V91, Y92, Q94, I95, H97, L98, K99, V101, L102, E103, E104, K105, L106, E107, K108, E109, D110, F111, R113, K115, L116, M117, L122, K123, R124, Y125, Y126, R128, L130, Y132, L133, K134, K136, E137, Y138, W143, E149, L151, R152, Y155, F156, R159, L160, Y163, L164, and R165 in the mature IFN-β polypeptide set forth in SEQ ID NO:1; and
the modified IFN-β polypeptide exhibits increased protease resistance compared to an IFN-β polypeptide that does not include the modification(s).

27. A modified IFN-β polypeptide of claim 26, wherein the one or more further amino acid modification(s) correspond to modifications selected from among M1V, M1I, M1T, M1A, M1Q, M1D, M1E, M1K, M1N, M1R, M1S, M1C, Y3H, L5V, L5I, L5T, L5Q, L5H, L5A, L5D, L5E, L5K, L5R, L5N, L5S, L6H, L6A, L6I, L6V, L6D, L6E, L6K, L6N, L6Q, L6R, L6S, L6T, L6T, L6C, F8I, F8V, F8D, F8E, F8K, F8R, L9V, L9I, L9T, L9Q, L9H, L9A, L9D, L9E, L9K, L9N, L9R, L9S, Q10D, Q10E, Q10K, Q10N, Q10R, Q10S, Q10T, Q10C, R11H, R11Q, S12D, S12E, S12K, S12R, S13D, S13E, S13K, S13N, S13Q, S13R, S13T, S13C, N14D, N14E, N14K, N14Q, N14R, N14S, N14T, F15I, F15V, F15D, F15E, F15K, F15R, Q16D, Q16E, Q16K, Q16N, Q16R, Q16S, Q16T, Q16C, C17D, C17E, C17K, C17N, C17R, C17S, C17T, Q18H, Q18T, K19Q, K19T, K19S, K19H, L20H, L20A, L20N, L20Q, L20R, L20S, L20T, L20D, L20E, L20K, L21I, L21V, L21T, L21Q, L21H, L21A, W22S, W22H, W22D, W22E, W22K, W22R, Q23H, Q23S, Q23T, Q23N, Q23D, Q23E, Q23K, Q23R, L24T, L24Q, L24H, L24I, L24V, L24D, L24E, L24K, L24R, N25H, N25S, N25Q, R27H, R27Q, L28V, L28I, L28T, L28Q, L28H, L28A, E29N, E29Q, E29H, Y30H, Y30I, L32V, L32I, L32T, L32Q, L32H, L32A, K33Q, K33T, K33S, K33H, D34Q, D34G, R35H, R35Q, M36V, M36I, M36T, M36Q, M36A, F38I, F38V, D39N, D39Q, D39H, D39G, E42Q, E42H, E43Q, E43H, K45Q, K45T, K45S, K45T, L47V, L47I, L47T, L47Q, L47H, L47A, Q48N, Q49N, K52Q, K52T, K52S, K52H, E53Q, E53H, D54Q, L57T, L57Q, L57H, L57A, L57V, Y60H, E61Q, M62I, M62V, M62T, M62Q, M62A, L63T, L63Q, L63H, L63A, L63V, Q64N, F67I, F67V, R71H, R71Q, Q72T, Q72N, D73N, D73Q, D73H, D73G, G78D, G78E, G78K, G78R, W79H, W79S, N80D, N80E, N80K, N80R, E81N, E81Q, E81H, T82D, T82E, T82K, T82R, I83D, I83E, I83K, I83R, I83N, I83Q, I83S, I83T, E85 Q, E85H, N86D, N86E, N86K, N86R, N86Q, N86S, N86T, L87H, L87A, L88T, L88Q, L88H, L88A, L87I, L87V, L87D, L87E, L87K, L87R, L87N, L87Q, L87S, L87T, A89D, A89E, A89K, A89R, N90D, N90E, N90K, N90Q, N90R, N90S, N90T, N90C, V91D, V91E, V91K, V91N, V91Q, V91R, V91S, V91T, V91C, Y92H, Y92I, Q94D, Q94E, Q94K, Q94N, Q94R, Q94S, Q94T, Q94C, I95D, I95E, I95K, I95N, I95Q, I95R, I95S, I95T, H97D, H97E, H97K, H97N, H97Q, H97R, H97S, H97T, H97C, L98H, L98A, L98D, L98E, L98K, L98N, L98Q, L98R, L98S, L98T, L98C, K99Q, K99T, K99S, K99H, V101D, V101E, V101K, V101N, V101Q, V101R, V101S, V101T, V101C, L102T, L102Q, L102H, L102A, L102I, L102V, E103Q, E103H, E104Q, E104H, K105Q, K105T, K105S, K105H, L106T, L106Q, L106H, L106A, E107H, K108N, K108Q, K108T, K108S, K108H, E109H, E109Q, D110N, D100Q, D110H, D110G, F111I, F111V, R113H, R113Q, K115Q, L116V, L116I, L116T, L116Q, L116H, L116A, M117I, M117V, M117T, M117Q, M117A, L122I, L122V, L122T, L122Q, L122H, L122A, K123Q, K123T, K123S, K123H, R124H, R124Q, Y125H, Y126H, R128H, R128Q, L130V, L130I, L130T, L130Q, L130H, L130A, L133T, L133Q, L133H, L133A, Y132I, K134Q, K134T, K134S, K134H, K136Q, K136T, K136S, K136H, E137N, E137Q, E137H, Y138H, Y138I, W143H, W143S, E149Q, L151T, L151Q, L151H, L151A, L151V, R152H, R152Q, F154V, F154I, Y155H, Y155I, F156I, F156V, R159H, R159Q, L160V, L160T, L160Q, L160H, L160A, L160I, Y163H, Y163I, L164T, L164Q, L164H, L164A, L164I, L164V, R165H, and R165Q in the mature IFN-β polypeptide set forth in SEQ ID NO:1.

28. A modified IFN-β polypeptide of claim 24, wherein the one or more further amino acid modification(s) at one or more positions corresponding to amino acid positions is selected from among Y3, L5, L6, F8, L9, Q10, F15, Q16, Q18, L20, L21, Q23, L28, E29, Y30, L32, F38, E42, E43, L47, Q48, Q49, E53, L57, Y60, E61, L63, Q64, F67, Q72, E81, E85, L87, L88, Y92, Q94, L98, L102, E103, E104, L106, E107, E109, F111, L116, L120, Y125, Y126, L130, Y132, L133, E137, Y138, E149, L151, F154, F156, L160, Y163, and L164 in the mature IFN-β polypeptide set forth in SEQ ID NO:1; and
the modified IFN-β polypeptide exhibits increased resistance to gelatinase B proteolysis compared to an IFN-β polypeptide that does not include the modification(s).

29. A modified IFN-β polypeptide of claim 28, wherein the one or more further amino acid modification(s) correspond to modifications selected from among Y3H, L5V, L5I, L5T, L5Q, L5H, L5A, L5D, L5E, L5K, L5R, L5N, L5S, L6I, L6V, L6H, L6A, L6D, L6E, L6K, L6N, L6Q, L6R, L6S, L6T, L6C, F8I, F8V, F8D, F8E, F8K, F8R, L9V, L9I, L9T, L9Q, L9H, L9A, L9D, L9E, L9K, L9N, L9R, L9S, Q10D, Q10E, Q10K, Q10N, Q10R, Q10S, Q10T, Q10C, F15I, F15V, F15D, F15E, F15K, F15R, Q16D, Q16E, Q16K, Q16N, Q16R, Q16S, Q16T, Q16C, Q18H, Q18T, L20H, L20A, L20N, L20Q, L20R, L20S, L20T, L20D, L20E, L20K, L21I, L21V, L21T, L21Q, L21H, L21A, Q23H, Q23S, Q23T, Q23N, Q23D, Q23E, Q23K, Q23R, L28V, L28I, L28T, L28Q, L28H, L28A, E29N, E29Q, E29H, Y30H, Y30I, L32V, L32I, L32T, L32Q, L32H, L32A, F38I, F38V, E42Q, E42H, E43Q, E43H, L47V, L47I, L47T, L47Q, L47H, L47A, Q48N, Q49N, E53Q, E53H, L57V, L57T, L57Q, L57H, L57A, Y60H, E61Q, L63V, L63T, L63Q, L63H, L63A, Q64N, F67I, F67V, Q72T, Q72N, E81N, E81Q, E81H, E85Q, E85H, L87I, L87V, L87H, L87A, L87D, L87E, L87, L87R, L87N, L87Q, L87S, L87T, L88T, L88Q, L88H, L88A, Y92H, Y92I, Q94D, Q94E, Q94K, Q94N, Q94R, Q94S, Q94T, Q94C, L98H, L98A, L98D, L98E, L98K, L98N, L98Q, L98R, L98S, L98T, L98C, L102I, L102V, L102T, L102Q, L102H, L102A, E103Q, E103H, E104Q, E104H, L106T, L106Q, L106H, L106A, E107Q, E107H, E109H, E109Q, F111I, F111V, L116V, L116I, L116T, L116Q, L116H, L116A, L116V, L116I, L116T, L116Q, L116H, L116A, Y125H, Y126H, L130V, L130I, L130T, L130Q, L130H, L130A, Y132H, L133I, L133V, L133T, L133Q, L133H, L133A, E137N, E137Q, E137H, Y138H, Y138I, E149Q, L151V, L151T, L151Q, L151H, L151A, F154I, F156I, F156V, L160I, L160V, L160T, L160Q, L160H, L160A, Y163H, Y163I, L164I, L164V, L164T, L164Q, L164H, and L164A in the mature IFN-β polypeptide set forth in SEQ ID NO:1.

30. A modified IFN-β polypeptide of claim 24, wherein the one or more further amino acid modification(s) is at one or more positions corresponding to amino acid positions is selected from among R11, K45, K52, K105, K108, R113, K115Q, R124, R152, and R165 in the mature IFN-β polypeptide set forth in SEQ ID NO:1; and
the modified IFN-β polypeptide exhibits a decreased isoelectric point compared to an IFN-β polypeptide that does not include the modification(s).

31. A modified IFN-β polypeptide of claim 30, wherein the one or more further amino acid modification(s) correspond to modifications selected from among R11Q, R11D, K45Q, K52Q, K105Q, K108Q, K108D, R113Q, R113E, K115Q, R124Q, R124D, R124E, R152Q, R152D, R165Q, and R165D in the mature IFN-β polypeptide set forth in SEQ ID NO:1.

32. A modified IFN-β polypeptide of claim 1, further comprising one or more amino acid modifications contributing to one or more of deimmunization, glycosylation, and/or PEGylation of the polypeptide.

33. A modified IFN-β polypeptide of claim 32, wherein the polypeptide is glycosylated and/or conjugated to a polyethylene glycol (PEG) moiety.

34. A modified IFN-β polypeptide, comprising:
two or more amino acid modifications in an unmodified IFN-β polypeptide, wherein:
the two or more amino acid modifications are at two or more positions corresponding to amino acid positions selected from among Y3, L6, R11, Q18, K19, L20, L21, Q23, L24, E29, K33, D34, F38, D39, P41, E42, E43, K45, Q48, Q49, F50, Q51, K52, E53, D54, L57, Y60, E61, M62, L63, Q64, F70, Q72, D73, W79, E81, E85, L87, L88, L98, K99, L102, E103, E104, K105, L106, E107, K108, E109, D110, R113, K115, M117, L122, K123, R124, Y125, Y126, Y132, L133, K134, K136, E137, W143, R147, E149, L151, R152, F154, F156, L160, L164, and R165 in the mature IFN-β polypeptide set forth in SEQ ID NO:1.

35. The modified IFN-β polypeptide of claim 34 that retains at least one in vivo activity of an IFN-β polypeptide.

36. The modified IFN-β polypeptide of claim 34 that has 1, 2, 3, 4, 5, 6, 7, 8, 9, 10, 11, 12, 13, 14, 15, 16, 17, 18, 19 or 20 amino acid modifications.

37. The modified IFN-β polypeptide of claim 34 that is a mature polypeptide.

38. The modified IFN-β polypeptide of claim 34 that is a precursor polypeptide.

39. A modified IFN-β polypeptide of claim 34, wherein the two or more amino acid modification(s) correspond to modifications selected from among Y3I, Y3H, L6I, L6V, L6H, L6A, R11D, Q18H, Q18S, Q18T, Q18N, K19N, L20I, L20V, L20H, L20A, L21I, L21V, L21T, L21Q, L21H, L21A, Q23H, Q23S, Q23T, Q23N, L24I, L24V, L24T, L24Q, L24H, L24A, E29N, K33N, D34N, D34Q, D34G, F38I, F38V, D39N, P41A, P41S, E42N, E43K, E43Q, E43H, E43N, K45D, K45N, Q48H, Q48S, Q48T, Q48N, Q49H, Q49S, Q49T, Q49N, F50I, F50V, Q51H, Q51S, Q51T, Q51N, K52D, K52N, E53R, E53Q, E53H, E53N, D54G, L57I, L57V, L57T, L57Q, L57H, L57A, Y60H, Y60I, E61K, E61Q, E61H, E61N, M62I, M62V, M62T, M62Q, M62H, M62A, L63I, L63V, L63T, L63Q, L63H, L63A, Q64H, Q64S, Q64T, Q64N, F70I, F70V, Q72H, Q72S, Q72T, Q72N, D73N, W79H, W79S, E81K, E81N, E85K, E85N, L87I, L87V, L87H, L87A, L88I, L88V, L88T, L88Q, L88H, L88A, L98I, L98V, L98H, L98A, K99N, L102I, L102V, L102T, L102Q, L102H, L102A, E103K, E103N, E104R, E104N, K105D, K105N, L106I, L106V, L106T, L106Q, L106H, L106A, E107R, E107N, K108D, K108N, E109R, E109N, D110K, D110N, R113E, K115D, K115Q, K115N, K115S, K115H, M117I, M117V, M117T, M117Q, M117A, L122I, L122V, L122T, L122Q, L122H, L122A, K123N, R124D, R124E, Y125H, Y125I, Y126H, Y126I, Y132H, Y132I, L133I, L133V, L133T, L133Q, L133H, L133A, K134N, K136N, E137N, W143H, W143S, R147H, R147Q, E149Q, E149H, E149N, L151I, L151V, L151T, L151Q, L151H, L151A, R152D, F154I, F154V, F156I, F156V, L160I, L160V, L160T, L160Q, L160H, L160A, L164I, L164V, L164T, L164Q, L164H, L164A, R165D in the mature IFN-β polypeptide set forth in SEQ ID NO:1.

40. The modified IFN-β polypeptide of claim 34, wherein the unmodified IFN-β polypeptide contains a sequence of amino acids set forth in SEQ ID NOS: 1 or 3.

41. The modified IFN-β polypeptide of claim 34, wherein the unmodified IFN-β polypeptide is an allelic or species variant of the polypeptide set forth in SEQ ID NO:1.

42. The modified IFN-β polypeptide of claim 41, wherein the allelic or species variant has 75%, 80%, 85%, 90%, 91%, 92%, 93%, 94%, 95%, 96%, 97%, 98%, or 99% sequence identity to the polypeptide set forth in SEQ ID NO:1 excluding the amino acid modification(s).

43. The modified IFN-β polypeptide of claim 34, wherein only the primary sequence is modified and the polypeptide exhibits increased protein stability.

44. The modified IFN-β polypeptide of claim 34 that exhibits increased protease resistance compared to the unmodified IFN-β polypeptide and retains one or more activities of the unmodified IFN-β polypeptide

45. A modified IFN-β polypeptide of claim 34, comprising one or more further amino acid modifications at one or more positions corresponding to amino acid positions selected from among M1, L5, L6, F8, L9, Q10, R11, S12, S13, N14, F15, Q16, C17, K19, L20, W22, Q23, L24, N25, R27, L28, E29, Y30, L32, K33, R35, M36, D39, E42, K45, L47, K52, F67, R71, D73, G78, W79, N80, E81, T82, I83, E85, N86, L87, A89, N90, V91, Y92, Q94, I95, H97, L98, K99, V101, E103, E104, K105, E107, K108, E109, D110, F111, R113, L116, L120, K123, R124, R128, L130, K134, K136, E137, Y138, R152, Y155, R159, Y163, and R165 in the mature IFN-β polypeptide set forth in SEQ ID NO:1.

46. A modified IFN-β polypeptide of claim 45, wherein the one or more further amino acid modification(s) correspond to modifications selected from among M1V, M1I, M1T, M1A, M1Q, M1D, M1E, M1K, M1N, M1R, M1S, M1C, L5V, L5I, L5T, L5Q, L5H, L5A, L5D, L5E, L5K, L5R, L5N, L5S, L6D, L6E, L6K, L6N, L6Q, L6R, L6S, L6T, L6T, L6C, F8I, F8V, F8D, F8E, F8K, F8R, L9V, L9I, L9T, L9Q, L9H, L9A, L9D, L9E, L9K, L9N, L9R, L9S, Q10D, Q10E, Q10K, Q10N, Q10R, Q10S, Q10T, Q10C, R11H, R11Q, S12D, S12E, S12K, S12R, S13D, S13E, S13K, S13N, S13Q, S13R, S13T, S13C, N14D, N14E, N14K, N14Q, N14R, N14S, N14T, F15I, F15V, F15D, F15E, F15K, F15R, Q16D, Q16E, Q16K, Q16N, Q16R, Q16S, Q16T, Q16C, C17D, C17E, C17K, C17N, C17R, C17S, C17T, K19Q, K19T, K19S, K19H, L20N, L20Q, L20R, L20S, L20T, L20D, L20E, L20K, W22S, W22H, W22D, W22E, W22K, W22R, Q23D, Q23E, Q23K, Q23R, L24D, L24E, L24K, L24R, N25H, N25S, N25Q, R27H, R27Q, L28V, L28I, L28T, L28Q, L28H, L28A, E29Q, E29H, Y30H, Y30I, L32V, L32I, L32T, L32Q, L32H, L32A, K33Q, K33T, K33S, K33H, R35H, R35Q, M36V, M36I, M36T, M36Q, M36A, D39Q, D39H, D39G, E42Q, E42H, K45Q, K45T, K45S, K45T, L47V, L47I, L47T, L47Q, L47H, L47A, K52Q, K52T, K52S, K52H, F67I, F67V, R71H, R71Q, D73Q, D73H, D73G, G78D, G78E, G78K, G78R, N80D, N80E, N80K, N80R, E81Q, E81H, T82D, T82E, T82K, T82R, I83D, I83E, I83K, I83R, I83N, I83Q, I83S, I83T, E85Q, E85H, N86D, N86E, N86K, N86R, N86Q, N86S, N86T, L87D, L87E, L87K, L87R, L87N, L87Q, L87S, L87T, A89D, A89E, A89K, A89R, N90D, N90E, N90K, N90Q, N90R, N90S, N90T, N90C, V91D, V91E, V91K, V91N, V91Q, V91R, V91S, V91T, V91C, Y92H, Y92I, Q94D, Q94E, Q94K, Q94N, Q94R, Q94S, Q94T, Q94C, I95D, I95E, I95K, I95N, I95Q, I95R, I95S, I95T, H97D, H97E, H97K, H97N, H97Q, H97R, H97S, H97T, H97C, L98D, L98E, L98K, L98N, L98Q, L98R, L98S, L98T, L98C, K99Q, K99T, K99S, K99H, V101D, V101E, V101K, V101N, V101Q, V101R, V101S, V101T, V101C, E103Q, E103H, E104Q, E104H, K105Q, K105T, K105S, K105H, E107Q, E107H, K108Q, K108T, K108S, K108H, E109H, E109Q, D110Q, D110H, D110G, F111I, F111V, R113H, R113Q, L116V, L116I, L116T, L116Q, L116H, L116A, L120V, L120I, L120T, L120Q, L120H, L120A, K123Q, K123T, K123S, K123H, R124H, R124Q, R128H, R128Q, L130V, L130I, L130T, L130Q, L130H, L130A, K134Q, K134T, K134S, K134H, K136Q, K136T, K136S, K136H, E137Q, E137H, Y138H, Y138I, R152H, R152Q, Y155H, Y155I, R159H, R159Q, Y163H, Y163I, R165H, and R165Q in the mature IFN-β polypeptide.

47. A modified IFN-β polypeptide of claim 34, further-comprising one or more amino acid modifications contributing to one or more of deimmunization, glycosylation and PEGylation of the polypeptide.

48. A modified IFN-β polypeptide of claim 47, wherein the polypeptide is glycosylated or conjugated to a polyethylene glycol (PEG) moiety.

49. A modified IFN-β polypeptide, comprising:
two or more amino acid modifications in an unmodified IFN-β polypeptide, wherein:
the two or more amino acid modifications are at two or more positions corresponding to amino acid positions selected from among M1, L5, L6, F8, L9, Q10, R11, S12, S13, N14, F15, Q16, C17, L20, W22, Q23, L24, E43, K45, K52, E53, D54, E61, G78, W79, N80, E81, T82, I83, E85, N86, L87, A89, N90, V91, Q94, I95, H97, L98, V101, E103, E104, K105, E107, K108, E109, D110, R113, K115, R124, R152, and R165 in the mature IFN-β polypeptide set forth in SEQ ID NO:1;
the modified IFN-β polypeptide exhibits increased protein stability manifested as increased conformational stability compared to the unmodified IFN-β polypeptide; and
the modified IFN-β polypeptide retains one or more activities of the unmodified IFN-β polypeptide.

50. The modified IFN-β polypeptide of claim 49 that has 1, 2, 3, 4, 5, 6, 7, 8, 9, 10, 11, 12, 13, 14, 15, 16, 17, 18, 19 or 20 amino acid modifications.

51. A modified IFN-β polypeptide of claim 49 that is a mature IFN-β polypeptide.

52. A modified IFN-β polypeptide of claim 49 that is a precursor IFN-β polypeptide.

53. A modified IFN-β polypeptide of claim 49, wherein the two or more amino acid modification(s) correspond to modifications selected from among M1E, M1D, M1K, M1R, M1N, M1Q, M1S, M1T, M1C, L5E, L5D, L5K, L5R, L5N, L5Q, L5S, L5T, L6C, F8E, F8D, F8K, F8R, L9E, L9D, L9K, L9R, L9N, L9Q, L9S, L9T, Q10C, Q10E, Q10D, Q10K, Q10R, Q10N, Q10S, Q10T, R11Q, R11D, S12E, S12D, S12K, S12R, S13E, S13D, S13K, S13R, S13N, S13Q, S13T, S13C, N14E, N14D, N14K, N14R, N14Q, N14S, N14T, F15E, F15D, F15K, F15R, Q16E, Q16D, Q16K, Q16R, Q16N, Q16S, Q16T, Q16C, C17E, C17D, C17K, C17R, C17N, C17Q, C17S, C17T, L20E, L20D, L20K, L20R, L20N, L20Q, L20S, L20T, W22E, W22D, W22K, W22R, Q23E, Q23D, Q23K, Q23R, L24E, L24D, L24K, L24R, E43K, K45Q, K45D, K52Q, K52D, E53R, D54K, E61K, G78E, G78D, G78K, G78R, W79E, W79D, W79K, W79R, N80E, N80D, N80K, N80R, E81K, T82E, T82D, T82K, T82R, I83E, I83D, I83K, I83R, I83N, I83Q, I83S, I83T, E85K, N86E, N86D, N86K, N86R, N86Q, N86S, N86T, L87E, L87D, L87K, L87R, L87N, L87Q, L87S, L87T, A89E, A89D, A89K, A89R, N90E, N90D, N90K, N90R, N90Q, N90S, N90T, N90C, V91E, V91D, V91K, V91R, V91N, V91Q, V91S, V91T, V91C, Q94E, Q94D, Q94K, Q94R, Q94N, Q94S, Q94T, Q94C, I95E, I95D, I95K, I95R, I95N, I95Q, I95S, I95T, H97E, H97D, H97K, H97R, H97N, H97Q, H97S, H97T, H97C, L98E, L98D, L98K, L98R, L98N, L98Q, L98S, L98T, L98C, V101C, V101E, V101D, V101K, V101R, V101N, V101Q, V101S, V101T, E103K, E104R, K105Q, K105D, E107R, K108Q, K108D, E109R, D110K, R113Q, R113E, K115Q, K115D, R124Q, R124D, R124E, R152Q, R152D, R165Q, and R165D in the mature IFN-β polypeptide set forth in SEQ ID NO:1.

54. The modified IFN-β polypeptide of claim 49, wherein the unmodified IFN-β polypeptide has a sequence of amino acids set forth in SEQ ID NO:1 or SEQ ID NO:3.

55. The modified IFN-β polypeptide of claim 49, wherein the unmodified IFN-β polypeptide is an allelic or species variant of the polypeptide set forth in SEQ ID NO:1.

56. The modified IFN-β polypeptide of claim 55, wherein the allelic or species variant has 75%, 80%, 85%, 90%, 91%, 92%, 93%, 94%, 95%, 96%, 97%, 98%, or 99% sequence identity to the polypeptide set forth in SEQ ID NO:1 excluding the amino acid modification(s).

57. The modified IFN-β polypeptide of claim 49, wherein only the primary sequence is modified and the polypeptide exhibits increased conformational stability.

58. A modified IFN-β polypeptide of claim 49, wherein:
the two or more amino acid modification(s) correspond to modifications selected from among L5E, L5D, L5K, L5R, F8E, F8D, F8K, F8R, L9E, L9D, L9K, L9R, S12E, S12D, S12K, S12R, F15E, F15D, F15K, F15R, Q16E, Q16D, Q16K, Q16R, L20E, L20D, L20K, L20R, W22E, W22D, W22K, W22R, Q23E, Q23D, Q23K, Q23R, L24E, L24D, L24K, L24R, G78E, G78D, G78K, G78R, W79E, W79D, W79K, W79R, N80E, N80D, N80K, N80R, T82E, T82D, T82K, T82R, I83E, I83D, I83K, I83R, N86E, N86D, N86K, N86R, L87E, L87D, L87K, L87R, A89E, A89D, A89K, and A89R in the mature IFN-β polypeptide set forth in SEQ ID NO:1; and
the amino acid modifications contribute to increased conformational stability due to the addition of charges to regions in helices A and C.

59. A modified IFN-β polypeptide of claim 49, wherein:
the two or more amino acid modification(s) correspond to modifications selected from among M1E, M1D, M1K, M1R, M1N, M1Q, M1S, M1T, L5E, L5D, L5K, L5R, L5N, L5Q, L5S, L5T, L6E, L6D, L6K, L6R, L6N, L6Q, L6S, L6T, L9E, L9D, L9K, L9R, L9N, L9Q, L9S, L9T, Q10E, Q10D, Q10K, Q10R, Q10N, Q10S, Q10T, S13E, S13D, S13K, S13R, S13N, S13Q, S13T, N14E, N14D, N14K, N14R, N14Q, N14S, N14T, Q16E, Q16D, Q16K, Q16R, Q16N, Q16S, Q16T, C17E, C17D, C17K, C17R, C17N, C17Q, C17S, C17T, L20E, L20D, L20K, L20R, L20N, L20Q, L20S, L20T, I83E, I83D, I83K, I83R, I83N, I83Q, I83S, I83T, N86E, N86D, N86K, N86R, N86Q, N86S, N86T, L87E, L87D, L87K, L87R, L87N, L87Q, L87S, L87T, N90E, N90D, N90K, N90R, N90Q, N90S, N90T, V91E, V91D, V91K, V91R, V91N, V91Q, V91S, V91T, Q94E, Q94D, Q94K, Q94R, Q94N, Q94S, Q94T, I95E, I95D, I95K, I95R, I95N, I95Q, I95S, I95T, H97E, H97D, H97K, H97R, H97N, H97Q, H97S, H97T, L98E, L98D, L98K, L98R, L98N, L98Q, L98S, L98T, V101E, V101D, V101K, V101R, V101N, V101Q, V101S, and V101T in the mature IFN-β polypeptide set forth in SEQ ID NO:1; and
the amino acid modifications contribute to increased conformational stability due to increased polar interactions between helices A and C.

60. A modified IFN-β polypeptide of claim 49, wherein:
the two or more amino acid modification(s) correspond to modifications selected from among M1C, L6C, Q10C, S13C, Q16C, N90C, V91C, Q94C, H97C, L98C, and V101C in the mature IFN-β polypeptide set forth in SEQ ID NO:1; and
the amino acid modifications result in introduction of a disulfide bridge in the IFN-β polypeptide.

61. A modified IFN-β polypeptide of claim 60, wherein the disulfide bridge formed between positions corresponds to amino acid positions C1-C101, C6-C98, C16-C90, C10-C97, C10-C98, or C13-C94 in the mature IFN-β polypeptide set forth in SEQ ID NO:1.

62. A modified IFN-β polypeptide of claim 49, wherein:
the two or more amino acid modification(s) correspond to modifications selected from among E43K, E53R, D54K, E61K, E81K, E85K, E103K, E104R, E107R, E109R, and D110K in the mature IFN-β polypeptide set forth in SEQ ID NO:1; and
the amino acid modifications contribute to increased conformational stability due to an increase in the isoelectric point.

63. A modified IFN-β polypeptide of claim 49, wherein:
the two or more amino acid modification(s) correspond to modifications selected from among R11D, R11Q, K45D, K45Q, K52D, K52Q, K105D, K105Q, K108D, K108Q, R113E, R113Q, K115D, K115Q, R124D, R124Q, R124E, R152D, R152Q, R165Q, and R165D in the mature IFN-β polypeptide set forth in SEQ ID NO:1

64. A modified IFN-β polypeptide of claim 49, further comprising one or more amino acid modifications contributing to one or more of deimmunization, glycosylation, and PEGylation of the polypeptide.

65. A modified IFN-β polypeptide of claim 64, wherein the polypeptide is glycosylated or conjugated to a polyethylene glycol (PEG) moiety.

66. A modified IFN-β polypeptide of any of claims 1, 34 and 49, wherein the one or more amino acid modifications are selected from natural amino acids, non-natural amino acids and a combination of natural and non-natural amino acids.

67. The modified IFN-β polypeptide of any of claims 1, 34 and 49 that is a naked polypeptide chain.

68. The modified IFN-β polypeptide of any of claims 1, 34 and 49 that is pegylated, albuminated and/or glycosylated.

69. A nucleic acid molecule, comprising a sequence of nucleotides encoding a modified IFN-β polypeptide of any of claims 1, 34 and 49.

70. A vector, comprising the nucleic acid molecule of claim 69.

71. A cell, comprising the vector of claim 70.

72. The cell of claim 71 that is a eukaryotic cell.

73. The cell of claim 71 that is a prokaryotic cell.

74. A method for production of a modified IFN-β polypeptide, comprising introducing a nucleic acid molecule of claim 69 into a cell, and culturing the cell under conditions whereby the encoded modified IFN-β polypeptide is expressed.

75. A method for production of a modified IFN-β polypeptide, comprising introducing a nucleic acid molecule of claim 69 into a cell-free system, whereby the encoded modified IFN-β polypeptide is expressed.

76. The method of claim 74, wherein the modified IFN-β polypeptide is glycosylated.

77. A pharmaceutical composition, comprising a modified IFN-β polypeptide of any of claims 1, 34 and 49 in a pharmaceutically acceptable excipient.

78. A pharmaceutical composition, consisting essentially of a modified IFN-β polypeptide of any of claims 1, 34 and 49.

79. The pharmaceutical composition of claim 77 that is formulated for oral, nasal or pulmonary administration.

80. The pharmaceutical composition of claim 79, wherein:
the IFN-β polypeptide exhibits increased protease resistance; and
the composition that is formulated for oral administration.

81. The pharmaceutical composition of claim 80, where the polypeptide exhibits increased resistance to one or more proteases selected from among pepsin, trypsin, chymotrypsin, elastase, aminopeptidase, gelatinase B, gelatinase A, α-chymotrypsin, carboxypeptidase, endoproteinase Arg-C, endoproteinase Asp-N, endoproteinase Glu-C, endoproteinase Lys-C, luminal pepsin, microvillar endopeptidase, dipeptidyl peptidase, enteropeptidase, hydrolase, NS3, factor Xa, Granzyme B, thrombin, plasmin, urokinase, tPA and PSA.

82. The pharmaceutical composition of claim 77, wherein the pharmaceutical composition does not contain exogenously added protease inhibitors.

83. The pharmaceutical composition of claim 77 that is formulated as a liquid, a pill, a tablet, a lozenge or a capsule.

84. The pharmaceutical composition of claim 83, wherein the lozenge delivers the modified IFN-β polypeptide to the mucosa of the mouth, throat, or gastrointestinal tract.

85. The pharmaceutical composition of claim 77, wherein the pharmaceutical composition is formulated for controlled-release of the modified IFN-β polypeptide.

86. The pharmaceutical composition of claim 83, wherein the pill, tablet, or capsule is coated with an enteric coating.

87. A method, comprising treating a subject by administering the pharmaceutical composition of claim 77, wherein the subject has a disease or condition that is responsive to administration of IFN-β.

88. The method of claim 87, wherein the disease or condition is selected from among a viral infection, a proliferative disorder, an autoimmune disease, and an inflammatory disorder.

89. The method of claim 88, wherein the autoimmune disease is multiple sclerosis, rheumatoid arthritis, chronic viral hepatitis, hepatitis A, hepatitis B, and myocardial viral infection.

90. The method of claim 88, wherein the proliferative disease is a cancer or bone disorder.

91. The method of claim 90, wherein the cancer is selected from among uveal melanoma, colon cancer, liver cancer, and a metastatic cancer.

92. The method of claim 90, wherein the bone disorder is osteoporosis or osteopenia.

93. The method of claim 88, wherein the inflammatory disorder is selected from among asthma, Guillain-Barre syndrome, and an inflammatory bowel disease.

94. The method of claim 93, wherein the inflammatory bowel disease is ulcerative colitis or Crohn's disease.

95. The method of claim 88, wherein the viral infection is chronic viral hepatitis or myocardial viral infection.

96. A method of treating multiple sclerosis, comprising administering a modified IFN-β polypeptide that exhibits increased resistance to cleavage by gelatinase B.

97. The method of claim 96, wherein the modified IFN-β polypeptide has a sequence of amino acids set forth in any one of SEQ ID NOS: 4-11, 16, 17, 20-27, 30-36, 39-42, 45-54, 61-70, 75-87, 157, 158, 163-168, 173, 174, 180-185, 190-193, 198, 199, 204, 205, 209, 210, 213-224, 233-238, 247-250, 266-279, 282, 283, 295-310, 328-358, 377-387, 396-403, 408-411, 447-454, 474-479, 497-504, 540-542, 547, 551, 555-558, 562-576, 578-583, 585-589, 591, 604-607, 610-614, 616-650, 652, 653, 655, 656, and 658.
